(19) United States
(12) Patent Application Publication
(10) Pub. No.: US 2021/0060064 A1
(43) Pub. Date: Mar. 4, 2021

(54) METHODS OF TREATING AGING-RELATED DISORDERS

(71) Applicant: HCW Biologics, Inc., Miramar, FL (US)

(72) Inventor: Hing Wong, Miramar, FL (US)

(21) Appl. No.: 16/557,875

(22) Filed: Aug. 30, 2019

Related U.S. Application Data
(60) Provisional application No. 62/816,683, filed on Mar. 11, 2019.
(60) Provisional application No. 62/725,038, filed on Aug. 30, 2018.
(60) Provisional application No. 62/817,244, filed on Mar. 12, 2019.
(60) Provisional application No. 62/724,969, filed on Aug. 30, 2018.
(60) Provisional application No. 62/817,230, filed on Mar. 12, 2019.
(60) Provisional application No. 62/725,043, filed on Aug. 30, 2018.
(60) Provisional application No. 62/725,010, filed on Aug. 30, 2018.
(60) Provisional application No. 62/749,007, filed on Oct. 22, 2018.
(60) Provisional application No. 62/746,832, filed on Oct. 17, 2018.
(60) Provisional application No. 62/749,506, filed on Oct. 23, 2018.
(60) Provisional application No. 62/817,241, filed on Mar. 12, 2019.
(60) Provisional application No. 62/881,088, filed on Jul. 31, 2019.
(60) Provisional application No. 62/881,039, filed on Jul. 31, 2019.

(51) Int. Cl. A61K 35/17; C07K 14/715; C07K 14/705

(52) U.S. Cl. CPC A61K 35/17; C07K 14/7155; C07K 2317/52; C07K 2317/24; C07K 2317/569; C07K 14/70503

(57) ABSTRACT

Provided herein are methods of treating an aging-related disease or condition in a subject in need thereof, killing or reducing the number of senescent cells in a subject in need thereof, improving the texture and/or appearance of skin and/or hair in a subject in need thereof, and assisting in the treatment of obesity in a subject in need thereof, that include administering to the subject a therapeutically effective amount of one or more natural killer (NK) cell activating agent(s) and/or a therapeutically effective number of activated NK cells.

### CROSS-REFERENCE TO RELATED APPLICATIONS

[0001] This application claims priority to: U.S. Patent Application Ser. No. 62/816,683, filed Mar. 11, 2019; U.S. Patent Application Ser. No. 62/725,038, filed Aug. 30, 2018; U.S. Patent Application Ser. No. 62/817,244, filed Mar. 12, 2019; U.S. Patent Application Ser. No. 62/881,039, filed Jul. 31, 2019; U.S. Patent Application Ser. No. 62/724,969, filed Aug. 30, 2018; U.S. Patent Application Ser. No. 62/817,230, filed Mar. 12, 2019; U.S. Patent Application Ser. No. 62/725,043, filed Aug. 30, 2018; U.S. Patent Application Ser. No. 62/725,010, filed Aug. 30, 2018; U.S. Patent Application Ser. No. 62/749,007, filed Oct. 22, 2018; U.S. Patent Application Ser. No. 62/746,832, filed Oct. 17, 2018; U.S. Patent Application Ser. No. 62/749,506, filed Oct. 23, 2018; U.S. Patent Application Ser. No. 62/817,241, filed Mar. 12, 2019; and U.S. Patent Application Ser. No. 62/881,088, filed Jul. 31, 2019, each of which is incorporated hereby reference in its entirety.

### TECHNICAL FIELD

[0002] The present disclosure relates to the field of immunology and cell biology.

### BACKGROUND

[0003] Senescence is a form of irreversible growth arrest accompanied by phenotypic changes, resistance to apoptosis, and activation of damage-sensing signaling pathways. Cellular senescence was first described in cultured human fibroblast cells that lost their ability to proliferate, reaching permanent arrest after about 50 population doublings (referred to as the Hayflick limit). Senescence is considered a stress response that can be induced by a wide range of intrinsic and extrinsic insults, including oxidative and genotoxic stress, DNA damage, telomere attrition, oncogenic activation, mitochondrial dysfunction, or chemotherapeutic agents.

[0004] Senescent cells remain metabolically active and can influence tissue hemostasis, disease, and aging through their secretory phenotype. Senescence is considered as a physiologic process and is important in promoting wound healing, tissue homeostasis, regeneration, and regulation of fibrosis. For instance, transient induction of senescent cells is observed during would healing and contributes to wound resolution. Senescence also plays a role in tumor suppression. The accumulation of senescent cells also drives aging and aging-related diseases and conditions. The senescent phenotype also can trigger chronic inflammatory responses and consequently augment chronic inflammatory conditions to promote tumor growth. The connection between senescence and aging was initially based on the observation that senescent cells accumulate in aged tissue. The use of transgenic models has enabled the detection of senescent cells systematically in many aging-related disorders. Strategies to selectively eliminate senescent cells have demonstrated that senescent cells play a causal role in aging-related disorders.

### SUMMARY

[0005] The present invention is based on the discovery that administration of NK cell activating agents to a mammal having a cancer resulted in a tumor inhibition and administration of NK cell activating agents to a diabetic animal model demonstrated improved skin and hair appearance and texture, and decreased blood glucose levels. In view of this discovery provided herein are methods of treating an aging-related disease or condition in a subject in need thereof that include administering to a subject identified as having an aging-related disease or condition a therapeutically effective amount of one or more natural killer (NK) cell activating agent (s) and/or a therapeutically effective number of activated NK cells. Also provided herein are methods of killing or reducing the number of senescent cells in a subject in need thereof that include administering to the subject a therapeutically effective amount of one or more NK cell activating agent(s) and/or or a therapeutically effective number of activated NK cells. Also provided herein are methods of improving the texture and/or appearance of skin and/or hair in a subject in need thereof over a period of time that include administering to the subject a therapeutically effective amount of one or more natural killer (NK) cell activating agent(s) and/or a therapeutically effective number of activated NK cells. Also provided herein are methods of assisting in the treatment of obesity in a subject in need thereof over a period of time that include administering to the subject a therapeutically effective amount of one or more natural killer (NK) cell activating agent(s) and/or a therapeutically effective number of activated NK cells.

[0006] Provided herein are methods of treating an aging-related disease or condition in a subject in need thereof that include administering to a subject identified as having an aging-related disease or condition a therapeutically effective amount of one or more natural killer (NK) cell activating agent(s).

[0007] Also provided herein are methods of killing or reducing the number of senescent cells in a subject in need thereof that include administering to the subject a therapeutically effective amount of one or more NK cell activating agent(s). In some embodiments of any of the methods described herein, the senescent cells are senescent cancer cells, senescent monocytes, senescent lymphocytes, senescent astrocytes, senescent microglia, senescent neurons, senescent tissue fibroblasts, senescent dermal fibroblasts, senescent keratinocytes, or other differentiated tissue-specific dividing functional cells. In some embodiments of any of the methods described herein, the senescent cancer cells are chemotherapy-induced senescent cells or radiation-induced senescent cells. In some embodiments of any of the methods described herein, the subject has been identified or diagnosed as having an aging-related disease or condition.

[0008] In some embodiments of any of the methods described herein, the aging-related disease or condition is selected from the group of: a cancer, an autoimmune disease, a metabolic disease, a neurodegenerative disease, a cardiovascular disease, a skin disease, a progeria disease, and a fragility disease. In some embodiments of any of the methods described herein, the cancer is selected from the group of: solid tumor, hematological tumor, sarcoma, osteosarcoma, glioblastoma, neuroblastoma, melanoma, rhabdomyosarcoma, Ewing sarcoma, osteosarcoma, B-cell neoplasms, multiple myeloma, B-cell lymphoma, B-cell non-Hodgkin's lymphoma, Hodgkin's lymphoma, chronic lymphocytic leukemia (CLL), acute myeloid leukemia (AML), chronic myeloid leukemia (CML), acute lymphocytic leukemia (ALL), myelodysplastic syndromes (MDS), cutaneous T-cell lymphoma, retinoblastoma, stomach cancer, urothelial carcinoma, lung cancer, renal cell carcinoma, gastric and esophageal cancer, pancreatic cancer, prostate cancer, breast cancer, colorectal cancer, ovarian cancer, non-small cell lung carcinoma, squamous cell head and neck carcinoma, endometrial cancer, cervical cancer, liver cancer, and hepatocellular carcinoma.

[0009] In some embodiments of any of the methods described herein, the autoimmune disease is type-1 diabetes.

[0010] In some embodiments of any of the methods described herein, the metabolic disease is selected from the group of: obesity, a lipodystrophy, and type-2 diabetes mellitus.

[0011] In some embodiments of any of the methods described herein, the neurodegenerative disease is selected from the group of: Alzheimer's disease, Parkinson's disease, and dementia.

[0012] In some embodiments of any of the methods described herein, the cardiovascular disease is selected from the group of: coronary artery disease, atherosclerosis, and pulmonary arterial hypertension.

[0013] In some embodiments of any of the methods described herein, the skin disease is selected from the group of: wound healing, alopecia, wrinkles, senile lentigo, skin thinning, xeroderma pigmentosum, and dyskeratosis congenita.

[0014] In some embodiments of any of the methods described herein, the progeria disease is selected from the group of: progeria and Hutchinson-Gilford Progeria Syndrome.

[0015] In some embodiments of any of the methods described herein, the fragility disease is selected from the group of: frailty, responsiveness to vaccination, osteoporosis, and sarcopenia.

[0016] In some embodiments of any of the methods described herein, the aging-related disease or condition is selected from the group of: age-related macular degeneration, osteoarthritis, adipose atrophy, idiopathic pulmonary fibrosis, kidney transplant failure, liver fibrosis, loss of bone mass, sarcopenia, age-associated loss of lung tissue elasticity, osteoporosis, age-associated renal dysfunction, and chemical-induced renal dysfunction.

[0017] In some embodiments of any of the methods described herein, the aging-related disease or condition is type-2 diabetes or atherosclerosis.

[0018] In some embodiments of any of the methods described herein, the administering results in a decrease in the number of senescent cells in a target tissue in the subject. In some embodiments of any of the methods described herein, the target tissue is selected from the group of: adipose tissue, pancreatic tissue, liver tissue, lung tissue, vasculature, bone tissue, central nervous system (CNS) tissue, eye tissue, skin tissue, muscle tissue, and secondary lympho-organ tissue.

[0019] In some embodiments of any of the methods described herein, the administering results in an increase in the expression levels of CD25, CD69, mTORC1, SREBP1, IFN-γ, and granzyme B in activated NK cells.

[0020] Also provided herein are methods of treating an aging-related disease or condition in a subject in need thereof that include administering to a subject identified as having an aging-related disease or condition a therapeutically effective number of activated NK cells.

[0021] Also provided herein are methods of killing or reducing the number of senescent cells in a subject in need thereof that include administering to the subject a therapeutically effective number of activated NK cells. In some embodiments of any of the methods described herein, the senescent cells are senescent cancer cells, senescent monocytes, senescent lymphocytes, senescent astrocytes, senescent microglia, senescent neurons, senescent tissue fibroblasts, senescent dermal fibroblasts, senescent keratinocytes, or other differentiated tissue-specific dividing functional cells. In some embodiments of any of the methods described herein, the senescent cancer cells are chemotherapy-induced senescent cells or radiation-induced senescent cells. In some embodiments of any of the methods described herein, the subject has been identified or diagnosed as having an aging-related disease or condition.

[0022] In some embodiments of any of the methods described herein, the aging-related disease or condition is selected from the group of: a cancer, an autoimmune disease, a metabolic disease, a neurodegenerative disease, a cardiovascular disease, a skin disease, a progeria disease, and a fragility disease. In some embodiments of any of the methods described herein, the cancer is selected from the group of: solid tumor, hematological tumor, sarcoma, osteosarcoma, glioblastoma, neuroblastoma, melanoma, rhabdomyosarcoma, Ewing sarcoma, osteosarcoma, B-cell neoplasms, multiple myeloma, B-cell lymphoma, B-cell non-Hodgkin's lymphoma, Hodgkin's lymphoma, chronic lymphocytic leukemia (CLL), acute myeloid leukemia (AML), chronic myeloid leukemia (CML), acute lymphocytic leukemia (ALL), myelodysplastic syndromes (MDS), cutaneous T-cell lymphoma, retinoblastoma, stomach cancer, urothelial carcinoma, lung cancer, renal cell carcinoma, gastric and esophageal cancer, pancreatic cancer, prostate cancer, breast cancer, colorectal cancer, ovarian cancer, non-small cell lung carcinoma, squamous cell head and neck carcinoma, endometrial cancer, cervical cancer, liver cancer, and hepatocellular carcinoma.

[0023] In some embodiments of any of the methods described herein, the autoimmune disease is type-1 diabetes.

[0024] In some embodiments of any of the methods described herein, the metabolic disease is selected from the group of: obesity, a lipodystrophy, and type-2 diabetes mellitus.

[0025] In some embodiments of any of the methods described herein, the neurodegenerative disease is selected from the group of: Alzheimer's disease, Parkinson's disease, and dementia.

[0026] In some embodiments of any of the methods described herein, the cardiovascular disease is selected from the group of: coronary artery disease, atherosclerosis, and pulmonary arterial hypertension.

[0027] In some embodiments of any of the methods described herein, the skin disease is selected from the group of: wound healing, alopecia, wrinkles, senile lentigo, skin thinning, xeroderma pigmentosum, and dyskeratosis congenita.

[0028] In some embodiments of any of the methods described herein, the progeria disease is selected from the group of: progeria and Hutchinson-Gilford Progeria Syndrome.

[0029] In some embodiments of any of the methods described herein, the fragility disease is selected from the group of: frailty, responsiveness to vaccination, osteoporosis, and sarcopenia.

[0030] In some embodiments of any of the methods described herein, the aging-related disease or condition is selected from the group of: age-related macular degeneration, osteoarthritis, adipose atrophy, idiopathic pulmonary fibrosis, kidney transplant failure, liver fibrosis, loss of bone mass, sarcopenia, age-associated loss of lung tissue elasticity, osteoporosis, age-associated renal dysfunction, and chemical-induced renal dysfunction.

[0031] Some embodiments of any of the methods described herein further include: obtaining a resting NK cell; and contacting the resting NK cell in vitro in a liquid culture medium including one or more NK cell activating agent(s), where the contacting results in the generation of the activated NK cells that are subsequently administered to the subject. In some embodiments of any of the methods described herein, the resting NK cell is an autologous NK cell obtained from the subject. In some embodiments of any of the methods described herein, the resting NK cell is an allogeneic resting NK cell. In some embodiments of any of the methods described herein, the resting NK cell is an artificial NK cell. In some embodiments of any of the methods described herein, the resting NK cell is a haploidentical resting NK cell. In some embodiments of any of the methods described herein, the resting NK cell is a genetically-engineered NK cell carrying a chimeric antigen receptor or recombinant T cell receptor. Some embodiments of any of the methods described herein further include isolating the activated NK cells before the activated NK cells are administered to the subject. Some embodiments of any of the methods described herein further include introducing a nucleic acid that encodes a chimeric antigen receptor or a recombinant T cell receptor into the resting NK cell or the activated NK cell prior to administration to the subject.

[0032] Also provided herein are methods of improving the texture and/or appearance of skin and/or hair in a subject in need thereof over a period of time that include administering to the subject a therapeutically effective amount of one or more natural killer (NK) cell activating agent(s).

[0033] Also provided herein are methods of improving the texture and/or appearance of skin and/or hair in a subject in need thereof over a period of time that include administering to the subject a therapeutically effective number of activated NK cells. Some embodiments of any of the methods described herein further include: obtaining a resting NK cell; and contacting the resting NK cell in vitro in a liquid culture medium including one or more NK cell activating agent(s), where the contacting results in the generation of the activated NK cells that are subsequently administered to the subject. In some embodiments of any of the methods described herein, the resting NK cell is an autologous NK cell obtained from the subject. In some embodiments of any of the methods described herein, the resting NK cell is an allogeneic resting NK cell. In some embodiments of any of the methods described herein, the resting NK cell is an artificial NK cell. In some embodiments of any of the methods described herein, the resting NK cell is a haploidentical resting NK cell. In some embodiments of any of the methods described herein, the resting NK cell is a genetically-engineered NK cell carrying a chimeric antigen receptor or recombinant T cell receptor. Some embodiments of any of the methods described herein further include isolating the activated NK cells before the activated NK cells are administered to the subject.

[0034] In some embodiments of any of the methods described herein, the method provides for an improvement in the texture and/or appearance of skin of the subject over the period of time. In some embodiments of any of the methods described herein, the method results in a decrease in the rate of formation of wrinkles in the skin of the subject over the period of time. In some embodiments of any of the methods described herein, the method results in an improvement in the coloration of skin of the subject over the period of time. In some embodiments of any of the methods described herein, the method results in an improvement in the texture of skin of the subject over the period of time. In some embodiments of any of the methods described herein, the method provides for an improvement in the texture and/or appearance of hair of the subject over the period of time. In some embodiments of any of the methods described herein, the method results in a decrease in the rate of formation of gray hair in the subject over the period of time. In some embodiments of any of the methods described herein, the method results in a decrease in the number of gray hairs of the subject over the period of time. In some embodiments of any of the methods described herein, the method results in a decrease in the rate of hair loss in the subject over time. In some embodiments of any of the methods described herein, the method results in an improvement in the texture of hair of the subject over the period of time.

[0035] In some embodiments of any of the methods described herein, the period of time is between about one month and about 10 years. In some embodiments of any of the methods described herein, the method results in a decrease in the number of senescent dermal fibroblasts in the skin of the subject over the period of time.

[0036] Also provided herein are methods of assisting in the treatment of obesity in a subject in need thereof over a period of time that include administering to the subject a therapeutically effective amount of one or more natural killer (NK) cell activating agent(s).

[0037] Also provided herein are methods of assisting in the treatment of obesity in a subject in need thereof over a period of time that include administering to the subject a therapeutically effective number of activated NK cells. Some embodiments of any of the methods described herein further include: obtaining a resting NK cell; and contacting the resting NK cell in vitro in a liquid culture medium including one or more NK cell activating agent(s), where the contacting results in the generation of the activated NK cells that are subsequently administered to the subject. In some embodiments of any of the methods described herein, the resting NK cell is an autologous NK cell obtained from the subject. In some embodiments of any of the methods described herein, the resting NK cell is an allogeneic resting NK cell. In some embodiments of any of the methods described herein, the resting NK cell is an artificial NK cell. In some embodiments of any of the methods described herein, the resting NK cell is a haploidentical resting NK cell. In some embodiments of any of the methods described herein, the resting NK cell is a genetically-engineered NK cell carrying a chimeric antigen receptor or recombinant T cell receptor. Some embodiments of any of the methods described herein further include isolating the activated NK cells before the activated NK cells are administered to the subject.

[0038] In some embodiments of any of the methods described herein, the method results in a decrease in the mass of the subject over the period of time. In some embodiments of any of the methods described herein, the method results in a decrease in the body mass index (BMI) of the subject over the period of time. In some embodiments of any of the methods described herein, the method results in a decrease in the rate of progression from pre-diabetes to type-2 diabetes in the subject. In some embodiments of any of the methods described herein, the method results in a decrease in fasting serum glucose level in the subject. In some embodiments of any of the methods described herein, the method results in an increase in insulin sensitivity in the subject. In some embodiments of any of the methods described herein, the method results in a decrease in the severity of atherosclerosis in the subject. In some embodiments of any of the methods described herein, the period of time is between about two weeks and about 10 years.

[0039] In some embodiments of any of the methods described herein, at least one of the one or more NK cell activating agent(s) results in activation of one or more of: a receptor for IL-2, a receptor for IL-7, a receptor for IL-12, a receptor for IL-15, a receptor for IL-18, a receptor for IL-21, a receptor for IL-33, CD16, CD69, CD25, CD59, CD352, NKp80, DNAM-1, 2B4, NKp30, NKp44, NKp46, NKG2D, KIR2DS1, KIR2Ds2/3, KIR2DL4, KIR2DS4, KIR2DS5, and KIR3DS1.

[0040] In some embodiments of any of the methods described herein, the at least one of the one or more NK cell activating agent(s) that results in activation of a receptor for IL-2 is a soluble IL-2 or an agonistic antibody that binds specifically to an IL-2 receptor.

[0041] In some embodiments of any of the methods described herein, the at least one of the one or more NK cell activating agent(s) that results in activation of a receptor for IL-7 is a soluble IL-7 or an agonistic antibody that binds specifically to an IL-7 receptor.

[0042] In some embodiments of any of the methods described herein, the at least one of the one or more NK cell activating agent(s) that results in activation of a receptor for IL-12 is a soluble IL-12 or an agonistic antibody that binds specifically to an IL-12 receptor. In some embodiments of any of the methods described herein, the at least one of the one or more NK cell activating agent(s) that results in activation of a receptor for IL-15 is a soluble IL-15 or an agonistic antibody that binds specifically to an IL-15 receptor.

[0043] In some embodiments of any of the methods described herein, the at least one of the one or more NK cell activating agent(s) that results in activation of a receptor for IL-21 is a soluble IL-21 or an agonistic antibody that binds specifically to an IL-21 receptor.

[0044] In some embodiments of any of the methods described herein, the at least one of the one or more NK cell activating agent(s) that results in activation of a receptor for IL-33 is a soluble IL-33 or an agonistic antibody that binds specifically to an IL-33 receptor.

[0045] In some embodiments of any of the methods described herein, the at least one of the one or more NK cell activating agent(s) that results in activation of a receptor for CD16 is an agonistic antibody that binds specifically to a CD16.

[0046] In some embodiments of any of the methods described herein, the at least one of the one or more NK cell activating agent(s) that results in activation of a receptor for CD69 is an agonistic antibody that binds specifically to a CD69.

[0047] In some embodiments of any of the methods described herein, the at least one of the one or more NK cell activating agent(s) that results in activation of a receptor for CD25 or CD59 is an agonistic antibody that binds specifically to CD25 or CD59.

[0048] In some embodiments of any of the methods described herein, the at least one of the one or more NK cell activating agent(s) that results in activation of a receptor for CD352 is an agonistic antibody that binds specifically to a CD352.

[0049] In some embodiments of any of the methods described herein, the at least one of the one or more NK cell activating agent(s) that results in activation of a receptor for NKp80 is an agonistic antibody that binds specifically to an NKp80.

[0050] In some embodiments of any of the methods described herein, the at least one of the one or more NK cell activating agent(s) that results in activation of a receptor for DNAM-1 is an agonistic antibody that binds specifically to a DNAM-1.

[0051] In some embodiments of any of the methods described herein, the at least one of the one or more NK cell activating agent(s) that results in activation of a receptor for 2B4 is an agonistic antibody that binds specifically to a 2B4.

[0052] In some embodiments of any of the methods described herein, the at least one of the one or more NK cell activating agent(s) that results in activation of a receptor for NKp30 is an agonistic antibody that binds specifically to an NKp30.

[0053] In some embodiments of any of the methods described herein, the at least one of the one or more NK cell activating agent(s) that results in activation of a receptor for NKp44 is an agonistic antibody that binds specifically to an NKp44.

[0054] In some embodiments of any of the methods described herein, the at least one of the one or more NK cell activating agent(s) that results in activation of a receptor for NKp46 is an agonistic antibody that binds specifically to an NKp46.

[0055] In some embodiments of any of the methods described herein, the at least one of the one or more NK cell activating agent(s) that results in activation of a receptor for NKG2D is an agonistic antibody that binds specifically to an NKG2D.

[0056] In some embodiments of any of the methods described herein, the at least one of the one or more NK cell activating agent(s) that results in activation of a receptor for KIR2DS1 is an agonistic antibody that binds specifically to a KIR2DS1.

[0057] In some embodiments of any of the methods described herein, the at least one of the one or more NK cell activating agent(s) that results in activation of a receptor for KIR2DS2/3 is an agonistic antibody that binds specifically to a KIR2DS2/3.

[0058] In some embodiments of any of the methods described herein, the at least one of the one or more NK cell activating agent(s) that results in activation of a receptor for KIR2DL4 is an agonistic antibody that binds specifically to a KIR2DL4.

[0059] In some embodiments of any of the methods described herein, the at least one of the one or more NK cell activating agent(s) that results in activation of a receptor for KIR2DS4 is an agonistic antibody that binds specifically to a KIR2DS4.

[0060] In some embodiments of any of the methods described herein, the at least one of the one or more NK cell activating agent(s) that results in activation of a receptor for KIR2DS5 is an agonistic antibody that binds specifically to a KIR2DS5.

[0061] In some embodiments of any of the methods described herein, the at least one of the one or more NK cell activating agent(s) that results in activation of a receptor for KIR3DS1 is an agonistic antibody that binds specifically to a KIR3DS1.

[0062] In some embodiments of any of the methods described herein, at least one of the one or more NK cell activating agent(s) results in a decrease in the activation of one or more of: PD-1, a TGF-β receptor, TIGIT, CD1, TIM-3, Siglec-7, IRP60, Tactile, IL1R8, NKG2A/KLRD1, KIR2DL1, KIR2DL2/3, KIR2DL5, KIR3DL1, KIR3DL2, ILT2/LIR-1, and LAG-2. In some embodiments of any of the methods described herein, the at least one of the one or more NK cell activating agent(s) that results in a decrease in the activation of PD-1 is an antagonistic antibody that binds specifically to PD-1, a soluble PD-1, a soluble PD-L1, or an antibody that binds specifically to PD-L1. In some embodiments of any of the methods described herein, at least one of the one or more NK cell activating agent(s) that results in a decrease in the activation of a TGF-β receptor is a soluble TGF-β receptor, an antibody that binds specifically to TGF-β, or an antagonistic antibody that binds specifically to a TGF-β receptor.

[0063] In some embodiments of any of the methods described herein, at least one of the one or more NK cell activating agent(s) that results in a decrease in the activation of TIGIT is an antagonistic antibody that binds specifically to TIGIT, a soluble TIGIT, or an antibody that binds specifically to a ligand of TIGIT.

[0064] In some embodiments of any of the methods described herein, at least one of the one or more NK cell activating agent(s) that results in a decrease in the activation of CD1 is an antagonistic antibody that binds specifically to CD1, a soluble CD1, or an antibody that binds specifically to a ligand of CD1.

[0065] In some embodiments of any of the methods described herein, at least one of the one or more NK cell activating agent(s) that results in a decrease in the activation of TIM-3 is an antagonistic antibody that binds specifically to TIM-3, a soluble TIM-3, or an antibody that binds specifically to a ligand of TIM-3.

[0066] In some embodiments of any of the methods described herein, at least one of the one or more NK cell activating agent(s) that results in a decrease in the activation of Siglec-7 is an antagonistic antibody that binds specifically to Siglec-7 or an antibody that binds specifically to a ligand of Siglec-7.

[0067] In some embodiments of any of the methods described herein, at least one of the one or more NK cell activating agent(s) that results in a decrease in the activation of IRP60 is an antagonistic antibody that binds specifically to IRP60 or an antibody that binds specifically to a ligand of IRP60.

[0068] In some embodiments of any of the methods described herein, at least one of the one or more NK cell activating agent(s) that results in a decrease in the activation of Tactile is an antagonistic antibody that binds specifically to Tactile or an antibody that binds specifically to a ligand of Tactile.

[0069] In some embodiments of any of the methods described herein, at least one of the one or more NK cell activating agent(s) that results in a decrease in the activation of IL1R8 is an antagonistic antibody that binds specifically to IL1R8 or an antibody that binds specifically to a ligand of IL1R8.

[0070] In some embodiments of any of the methods described herein, at least one of the one or more NK cell activating agent(s) that results in a decrease in the activation of NKG2A/KLRD1 is an antagonistic antibody that binds specifically to NKG2A/KLRD1 or an antibody that binds specifically to a ligand of NKG2A/KLRD1.

[0071] In some embodiments of any of the methods described herein, at least one of the one or more NK cell activating agent(s) that results in a decrease in the activation of KIR2DL1 is an antagonistic antibody that binds specifically to KIR2DL1 or an antibody that binds specifically to a ligand of KIR2DL1.

[0072] In some embodiments of any of the methods described herein, at least one of the one or more NK cell activating agent(s) that results in a decrease in the activation of KIR2DL2/3 is an antagonistic antibody that binds specifically to KIR2DL2/3 or an antibody that binds specifically to a ligand of KIR2DL2/3.

[0073] In some embodiments of any of the methods described herein, at least one of the one or more NK cell activating agent(s) that results in a decrease in the activation of KIR2DL5 is an antagonistic antibody that binds specifically to KIR2DL5 or an antibody that binds specifically to a ligand of KIR2DL5.

[0074] In some embodiments of any of the methods described herein, at least one of the one or more NK cell activating agent(s) that results in a decrease in the activation of KIR3DL1 is an antagonistic antibody that binds specifically to KIR3DL1 or an antibody that binds specifically to a ligand of KIR3DL1.

[0075] In some embodiments of any of the methods described herein, at least one of the one or more NK cell activating agent(s) that results in a decrease in the activation of KIR3DL2 is an antagonistic antibody that binds specifically to KIR3DL2 or an antibody that binds specifically to a ligand of KIR3DL2.

[0076] In some embodiments of any of the methods described herein, at least one of the one or more NK cell activating agent(s) that results in a decrease in the activation of ILT2/LIR-1 is an antagonistic antibody that binds specifically to ILT2/LIR-1 or an antibody that binds specifically to a ligand of ILT2/LIR-1.

[0077] In some embodiments of any of the methods described herein, at least one of the one or more NK cell activating agent(s) that results in a decrease in the activation of LAG-2 is an antagonistic antibody that binds specifically to LAG-2 or an antibody that binds specifically to a ligand of LAG-2.

[0078] In some embodiments of any of the methods described herein, at least one of the one or more NK cell activating agent(s) is a single-chain chimeric polypeptide that includes: (i) a first target-binding domain; (ii) a soluble tissue factor domain; and (iii) a second target-binding domain. In some embodiments of any of the methods described herein, the first target-binding domain and the soluble tissue factor domain directly abut each other. In some embodiments of any of the methods described herein, the single-chain chimeric polypeptide further includes a linker sequence between the first target-binding domain and the soluble tissue factor domain. In some embodiments of any of the methods described herein, the soluble tissue factor domain and the second target-binding domain directly abut each other. In some embodiments of any of the methods described herein, the single-chain chimeric polypeptide further includes a linker sequence between the soluble tissue factor domain and the second target-binding domain. In some embodiments of any of the methods described herein, the first target-binding domain and the second target-binding domain directly abut each other. In some embodiments of any of the methods described herein, the single-chain chimeric polypeptide further includes a linker sequence between the first target-binding domain and the second target-binding domain. In some embodiments of any of the methods described herein, the second target-binding domain and the soluble tissue factor domain directly abut each other. In some embodiments of any of the methods described herein, the single-chain chimeric polypeptide further includes a linker sequence between the second target-binding domain and the soluble tissue factor domain.

[0079] In some embodiments of any of the methods described herein, the first target-binding domain and the second target-binding domain bind specifically to the same antigen. In some embodiments of any of the methods described herein, the first target-binding domain and the second target-binding domain bind specifically to the same epitope. In some embodiments of any of the methods described herein, the first target-binding domain and the second target-binding domain include the same amino acid sequence.

[0080] In some embodiments of any of the methods described herein, the first target-binding domain and the second target-binding domain bind specifically to different antigens.

[0081] In some embodiments of any of the methods described herein, one or both of the first target-binding domain and the second target-binding domain is an antigen-binding domain. In some embodiments of any of the methods described herein, the first target-binding domain and the second target-binding domain are each an antigen-binding domain. In some embodiments of any of the methods described herein, the antigen-binding domain includes a scFv or a single domain antibody.

[0082] In some embodiments of any of the methods described herein, one or both of the first target-binding domain and the second target-binding domain bind to a target selected from the group of: CD16a, CD33, CD20, CD19, CD22, CD123, PDL-1, TIGIT, PD-1, TIM3, CTLA4, MICA, MICB, IL-6, IL-8, TNFα, CD26, CD36, ULBP2, CD30, CD200, IGF-1R, MUC4AC, MUC5AC, Trop-2, CMET, EGFR, HER1, HER2, HER3, PSMA, CEA, B7H3, EPCAM, BCMA, P-cadherin, CEACAM5, a UL16-binding protein, HLA-DR, DLL4, TYRO3, AXL, MER, CD122, CD155, PDGF-DD, a ligand of TGF-β receptor II (TGF-βRII), a ligand of TGF-βRIII, a ligand of DNAM1, a ligand of NKp46, a ligand of NKp44, a ligand of NKG2D, a ligand of NKp30, a ligand for a scMHCI, a ligand for a scMHCII, a ligand for a scTCR, a receptor for PDGF-DD, a receptor for stem cell factor (SCF), a receptor for stem cell-like tyrosine kinase 3 ligand (FLT3L), a receptor for MICA, a receptor for MICB, a receptor for a ULP16-binding protein, a receptor for CD155, and a receptor for CD122.

[0083] In some embodiments of any of the methods described herein, one or both of the first target-binding domain and the second target-binding domain is a soluble interleukin or cytokine protein. In some embodiments of any of the methods described herein, the soluble interleukin or cytokine protein is selected from the group of: IL-1, IL-2, IL-3, IL-7, IL-8, IL-10, IL-12, IL-15, IL-17, IL-18, IL-21, PDGF-DD, and SCF.

[0084] In some embodiments of any of the methods described herein, one or both of the first target-binding domain and the second target-binding domain is a soluble interleukin or cytokine receptor. In some embodiments of any of the methods described herein, the soluble interleukin or cytokine receptor is a soluble TGF-β receptor II (TGF-βRII) a soluble TGF-βRIII, a soluble receptor for TNFα, a soluble receptor for IL-4, or a soluble receptor for IL-10.

[0085] In some embodiments of any of the methods described herein, the soluble tissue factor domain is a soluble human tissue factor domain. In some embodiments of any of the methods described herein, the soluble human tissue factor domain includes a sequence that is at least 80% identical to SEQ ID NO: 93. In some embodiments of any of the methods described herein, the soluble human tissue factor domain includes a sequence that is at least 90% identical to SEQ ID NO: 93. In some embodiments of any of the methods described herein, the soluble human tissue factor domain includes a sequence that is at least 95% identical to SEQ ID NO: 93. In some embodiments of any of the methods described herein, the soluble human tissue factor domain does not include one or more of: a lysine at an amino acid position that corresponds to amino acid position 20 of mature wildtype human tissue factor protein; an isoleucine at an amino acid position that corresponds to amino acid position 22 of mature wildtype human tissue factor protein; a tryptophan at an amino acid position that corresponds to amino acid position 45 of mature wildtype human tissue factor protein; an aspartic acid at an amino acid position that corresponds to amino acid position 58 of mature wildtype human tissue factor protein; a tyrosine at an amino acid position that corresponds to amino acid position 94 of mature wildtype human tissue factor protein; an arginine at an amino acid position that corresponds to amino acid position 135 of mature wildtype human tissue factor protein; and a phenylalanine at an amino acid position that corresponds to amino acid position 140 of mature wildtype human tissue factor protein.

[0086] In some embodiments of any of the methods described herein, the soluble human tissue factor domain does not include any of: a lysine at an amino acid position that corresponds to amino acid position 20 of mature wildtype human tissue factor protein; an isoleucine at an amino acid position that corresponds to amino acid position 22 of mature wildtype human tissue factor protein; a tryptophan at an amino acid position that corresponds to amino acid position 45 of mature wildtype human tissue factor protein; an aspartic acid at an amino acid position that corresponds to amino acid position 58 of mature wildtype human tissue factor protein; a tyrosine at an amino acid position that corresponds to amino acid position 94 of mature wildtype human tissue factor protein; an arginine at an amino acid position that corresponds to amino acid position 135 of mature wildtype human tissue factor protein; and a phenylalanine at an amino acid position that corresponds to amino acid position 140 of mature wildtype human tissue factor protein.

[0087] In some embodiments of any of the methods described herein, the soluble tissue factor domain is not capable of binding Factor VIIa. In some embodiments of any of the methods described herein, the soluble tissue factor domain does not convert inactive Factor X into Factor Xa. In some embodiments of any of the methods described herein, the single-chain chimeric polypeptide does not blood stimulate coagulation in a mammal. In some embodiments of any of the methods described herein, the single-chain chimeric polypeptide further includes one or more additional target-binding domains at its N- and/or C-terminus.

[0088] In some embodiments of any of the methods described herein, the single-chain chimeric polypeptide includes one or more additional target-binding domains at its N-terminus. In some embodiments of any of the methods described herein, one or more additional target-binding domains directly abuts the first target-binding domain, the second target-binding domain, or the soluble tissue factor domain. In some embodiments of any of the methods described herein, the single-chain chimeric polypeptide further includes a linker sequence between one of the at least one additional target-binding domains and the first target-binding domain, the second target-binding domain, or the soluble tissue factor domain.

[0089] In some embodiments of any of the methods described herein, the single-chain chimeric polypeptide includes one or more additional target-binding domains at its C-terminus. In some embodiments of any of the methods described herein, one of the one or more additional target-binding domains directly abuts the first target-binding domain, the second target-binding domain, or the soluble tissue factor domain. In some embodiments of any of the methods described herein, the single-chain chimeric polypeptide further includes a linker sequence between one of the at least one additional target-binding domains and the first target-binding domain, the second target-binding domain, or the soluble tissue factor domain.

[0090] In some embodiments of any of the methods described herein, the single-chain chimeric polypeptide includes one or more additional target binding domains at its N-terminus and the C-terminus. In some embodiments of any of the methods described herein, one of the one or more additional antigen binding domains at the N-terminus directly abuts the first target-binding domain, the second target-binding domain, or the soluble tissue factor domain. In some embodiments of any of the methods described herein, the single-chain chimeric polypeptide further includes a linker sequence between one of the one or more additional antigen-binding domains at the N-terminus and the first target-binding domain, the second target-binding domain, or the soluble tissue factor domain. In some embodiments of any of the methods described herein, one of the one or more additional antigen binding domains at the C-terminus directly abuts the first target-binding domain, the second target-binding domain, or the soluble tissue factor domain. In some embodiments of any of the methods described herein, the single-chain chimeric polypeptide further includes a linker sequence between one of the one or more additional antigen-binding domains at the C-terminus and the first target-binding domain, the second target-binding domain, or the soluble tissue factor domain.

[0091] In some embodiments of any of the methods described herein, two or more of the first target-binding domain, the second target-binding domain, and the one or more additional target-binding domains bind specifically to the same antigen. In some embodiments of any of the methods described herein, two or more of the first target-binding domain, the second target-binding domain, and the one or more additional target-binding domains bind specifically to the same epitope. In some embodiments of any of the methods described herein, two or more of the first target-binding domain, the second target-binding domain, and the one or more additional target-binding domains include the same amino acid sequence. In some embodiments of any of the methods described herein, the first target-binding domain, the second target-binding domain, and the one or more additional target-binding domains each bind specifically to the same antigen. In some embodiments of any of the methods described herein, the first target-binding domain, the second target-binding domain, and the one or more additional target-binding domains each bind specifically to the same epitope. In some embodiments of any of the methods described herein, the first target-binding domain, the second target-binding domain, and the one or more additional target-binding domains each include the same amino acid sequence.

[0092] In some embodiments of any of the methods described herein, the first target-binding domain, the second target-binding domain, and the one or more additional target-binding domains bind specifically to different antigens.

[0093] In some embodiments of any of the methods described herein, one or more of the first target-binding domain, the second target-binding domain, and the one or more target-binding domains is an antigen-binding domain. In some embodiments of any of the methods described herein, the first target-binding domain, the second target-binding domain, and the one or more additional target-binding domains are each an antigen-binding domain. In some embodiments of any of the methods described herein, the antigen-binding domain includes a scFv or a single domain antibody.

[0094] In some embodiments of any of the methods described herein, one or more of the first target-binding domain, the second target-binding domain, and the one or more target-binding domains bind specifically to a target selected from the group of: CD16a, CD33, CD20, CD19, CD22, CD123, PDL-1, TIGIT, PD-1, TIM3, CTLA4, MICA, MICB, IL-6, IL-8, TNFα, CD26, CD36, ULBP2, CD30, CD200, IGF-1R, MUC4AC, MUC5AC, Trop-2, CMET, EGFR, HER1, HER2, HER3, PSMA, CEA, B7H3, EPCAM, BCMA, P-cadherin, CEACAM5, a UL16-binding protein, HLA-DR, DLL4, TYRO3, AXL, MER, CD122, CD155, PDGF-DD, a ligand of TGF-β receptor II (TGF-βRII), a ligand of TGF-βRIII, a ligand of DNAM1, a ligand of NKp46, a ligand of NKp44, a ligand of NKG2D, a ligand of NKp30, a ligand for a scMHCI, a ligand for a scMHCII, a ligand for a scTCR, a receptor for PDGF-DD, a receptor for stem cell factor (SCF), a receptor for stem cell-like tyrosine kinase 3 ligand (FLT3L), a receptor for MICA, a receptor for MICB, a receptor for a ULP16-binding protein, a receptor for CD155, and a receptor for CD122.

[0095] In some embodiments of any of the methods described herein, one or more of the first target-binding domain, the second target-binding domain, and the one or more additional target-binding domains is a soluble interleukin or cytokine protein. In some embodiments of any of the methods described herein, the soluble interleukin or cytokine protein is selected from the group of: IL-1, IL-2, IL-3, IL-7, IL-8, IL-10, IL-12, IL-15, IL-17, IL-18, IL-21, PDGF-DD, and SCF.

[0096] In some embodiments of any of the methods described herein, one or more of the first target-binding domain, the second target-binding domain, and the one or more additional target-binding domains is a soluble interleukin or cytokine receptor. In some embodiments of any of the methods described herein, the soluble receptor is a soluble TGF-β receptor II (TGF-βRII) a soluble TGF-βRIII, a soluble receptor for TNFα, a soluble receptor for IL-4, or a soluble receptor for IL-10.

[0097] In some embodiments of any of the methods described herein, at least one of the one or more NK cell activating agent(s) is a multi-chain chimeric polypeptide that includes: (a) a first chimeric polypeptide including: (i) a first target-binding domain; (ii) a soluble tissue factor domain; and (iii) a first domain of a pair of affinity domains; and (b) a second chimeric polypeptide including: (i) a second domain of a pair of affinity domains; and (ii) a second target-binding domain, where the first chimeric polypeptide and the second chimeric polypeptide associate through the binding of the first domain and the second domain of the pair of affinity domains.

[0098] In some embodiments of any of the methods described herein, the first target-binding domain and the soluble tissue factor domain directly abut each other in the first chimeric polypeptide. In some embodiments of any of the methods described herein, the first chimeric polypeptide further includes a linker sequence between the first target-binding domain and the soluble tissue factor domain in the first chimeric polypeptide. In some embodiments of any of the methods described herein, the soluble tissue factor domain and the first domain of the pair of affinity domains directly abut each other in the first chimeric polypeptide. In some embodiments of any of the methods described herein, the first chimeric polypeptide further includes a linker sequence between the soluble tissue factor domain and the first domain of the pair of affinity domains in the first chimeric polypeptide. In some embodiments of any of the methods described herein, the second domain of the pair of affinity domains and the second target-binding domain directly abut each other in the second chimeric polypeptide. In some embodiments of any of the methods described herein, the second chimeric polypeptide further includes a linker sequence between the second domain of the pair of affinity domains and the second target-binding domain in the second chimeric polypeptide.

[0099] In some embodiments of any of the methods described herein, the first target-binding domain and the second target-binding domain bind specifically to the same antigen. In some embodiments of any of the methods described herein, the first target-binding domain and the second target-binding domain bind specifically to the same epitope. In some embodiments of any of the methods described herein, the first target-binding domain and the second target-binding domain include the same amino acid sequence.

[0100] In some embodiments of any of the methods described herein, the first target-binding domain and the second target-binding domain bind specifically to different antigens.

[0101] In some embodiments of any of the methods described herein, one or both of the first target-binding domain and the second target-binding domain is an antigen-binding domain. In some embodiments of any of the methods described herein, the first target-binding domain and the second target-binding domain are each antigen-binding domains. In some embodiments of any of the methods described herein, the antigen-binding domain includes a scFv or a single domain antibody.

[0102] In some embodiments of any of the methods described herein, one or both of the first target-binding domain and the second target-binding domain bind specifically to a target selected from the group of: CD16a, CD33, CD20, CD19, CD22, CD123, PDL-1, TIGIT, PD-1, TIM3, CTLA4, MICA, MICB, IL-6, IL-8, TNFα, CD26, CD36, ULBP2, CD30, CD200, IGF-1R, MUC4AC, MUC5AC, Trop-2, CMET, EGFR, HER1, HER2, HER3, PSMA, CEA, B7H3, EPCAM, BCMA, P-cadherin, CEACAM5, a UL16-binding protein, HLA-DR, DLL4, TYRO3, AXL, MER, CD122, CD155, PDGF-DD, a ligand of TGF-β receptor II (TGF-βRII), a ligand of TGF-βRIII, a ligand of DNAM1, a ligand of NKp46, a ligand of NKp44, a ligand of NKG2D, a ligand of NKp30, a ligand for a scMHCI, a ligand for a scMHCII, a ligand for a scTCR, a receptor for PDGF-DD, a receptor for stem cell factor (SCF), a receptor for stem cell-like tyrosine kinase 3 ligand (FLT3L), a receptor for MICA, a receptor for MICB, a receptor for a ULP16-binding protein, a receptor for CD155, and a receptor for CD122.

[0103] In some embodiments of any of the methods described herein, one or both of the first target-binding domain and the second target-binding domain is a soluble interleukin or cytokine protein. In some embodiments of any of the methods described herein, the soluble interleukin or cytokine protein is selected from the group of: IL-1, IL-2, IL-3, IL-7, IL-8, IL-10, IL-12, IL-15, IL-17, IL-18, IL-21, PDGF-DD, and SCF.

[0104] In some embodiments of any of the methods described herein, one or both of the first target-binding domain and the second target-binding domain is a soluble interleukin or cytokine receptor. In some embodiments of any of the methods described herein, the soluble receptor is a soluble TGF-β receptor II (TGF-βRII) a soluble TGF-βRIII, a soluble receptor for TNFα, a soluble receptor for IL-4, or a soluble receptor for IL-10.

[0105] In some embodiments of any of the methods described herein, the first chimeric polypeptide further includes one or more additional target-binding domain(s), where at least one of the one or more additional antigen-binding domain(s) is positioned between the soluble tissue factor domain and the first domain of the pair of affinity domains. In some embodiments of any of the methods described herein, the first chimeric polypeptide further includes a linker sequence between the soluble tissue factor domain and the at least one of the one or more additional antigen-binding domain(s), and/or a linker sequence between the at least one of the one or more additional antigen-binding domain(s) and the first domain of the pair of affinity domains.

[0106] In some embodiments of any of the methods described herein, the first chimeric polypeptide further includes one or more additional target-binding domains at the N-terminal and/or C-terminal end of the first chimeric polypeptide. In some embodiments of any of the methods described herein, at least one of the one or more additional target-binding domains directly abuts the first domain of the pair of affinity domains in the first chimeric polypeptide. In some embodiments of any of the methods described herein, the first chimeric polypeptide further includes a linker sequence between the at least one of the one or more additional target-binding domains and the first domain of the pair of affinity domains. In some embodiments of any of the methods described herein, the at least one of the one or more additional target-binding domains directly abuts the first target-binding domain in the first chimeric polypeptide. In some embodiments of any of the methods described herein, the first chimeric polypeptide further includes a linker sequence between the at least one of the one or more additional target-binding domains and the first target-binding domain.

[0107] In some embodiments of any of the methods described herein, at least one of the one or more additional target-binding domains is disposed at the N- and/or C-terminus of the first chimeric polypeptide, and at least one of the one or more additional target-binding domains is positioned between the soluble tissue factor domain and the first domain of the pair of affinity domains in the first chimeric polypeptide. In some embodiments of any of the methods described herein, the at least one additional target-binding domain of the one or more additional target-binding domains disposed at the N-terminus directly abuts the first target-binding domain or the first domain of the pair of affinity domains in the first chimeric polypeptide. In some embodiments of any of the methods described herein, the first chimeric polypeptide further includes a linker sequence disposed between the at least one additional target-binding domain and the first target-binding domain or the first domain of the pair of affinity domains in the first chimeric polypeptide. In some embodiments of any of the methods described herein, the at least one additional target-binding domain of the one or more additional target-binding domains disposed at the C-terminus directly abuts the first target-binding domain or the first domain of the pair of affinity domains in the first chimeric polypeptide. In some embodiments of any of the methods described herein, the first chimeric polypeptide further includes a linker sequence disposed between the at least one additional target-binding domain and the first target-binding domain or the first domain of the pair of affinity domains in the first chimeric polypeptide. In some embodiments of any of the methods described herein, the at least one of the one or more additional target-binding domains positioned between the soluble tissue factor domain and the first domain of the pair of affinity domains, directly abuts the soluble tissue factor domain and/or the first domain of the pair of affinity domains. In some embodiments of any of the methods described herein, the first chimeric polypeptide further includes a linker sequence disposed (i) between the soluble tissue factor domain and the at least one of the one or more additional target-binding domains positioned between the soluble tissue factor domain and the first domain of the pair of affinity domains, and/or (ii) between the first domain of the pair of affinity domains and the at least one of the one or more additional target-binding domains positioned between the soluble tissue factor domain and the first domain of the pair of affinity domains.

[0108] In some embodiments of any of the methods described herein, the second chimeric polypeptide further includes one or more additional target-binding domains at the N-terminal end or the C-terminal end of the second chimeric polypeptide. In some embodiments of any of the methods described herein, at least one of the one or more additional target-binding domains directly abuts the second domain of the pair of affinity domains in the second chimeric polypeptide. In some embodiments of any of the methods described herein, the second chimeric polypeptide further includes a linker sequence between at least one of the one or more additional target-binding domains and the second domain of the pair of affinity domains in the second chimeric polypeptide. In some embodiments of any of the methods described herein, at least one of the one or more additional target-binding domains directly abuts the second target-binding domain in the second chimeric polypeptide. In some embodiments of any of the methods described herein, the second chimeric polypeptide further includes a linker sequence between at least one of the one or more additional target-binding domains and the second target-binding domain in the second chimeric polypeptide.

[0109] In some embodiments of any of the methods described herein, two or more of the first target-binding domain, the second target-binding domain, and the one or more additional target-binding domains bind specifically to the same antigen. In some embodiments of any of the methods described herein, two or more of the first target-binding domain, the second target-binding domain, and the one or more additional target-binding domains bind specifically to the same epitope. In some embodiments of any of the methods described herein, two or more of the first target-binding domain, the second target-binding domain, and the one or more additional target-binding domains include the same amino acid sequence. In some embodiments of any of the methods described herein, the first target-binding domain, the second target-binding domain, and the one or more additional target-binding domains each bind specifically to the same antigen. In some embodiments of any of the methods described herein, the first target-binding domain, the second target-binding domain, and the one or more additional target-binding domains each bind specifically to the same epitope. In some embodiments of any of the methods described herein, the first target-binding domain, the second target-binding domain, and the one or more additional target-binding domains each include the same amino acid sequence.

[0110] In some embodiments of any of the methods described herein, the first target-binding domain, the second target-binding domain, and the one or more additional target-binding domains bind specifically to different antigens. In some embodiments of any of the methods described herein, one or more of the first target-binding domain, the second target-binding domain, and the one or more target-binding domains is an antigen-binding domain. In some embodiments of any of the methods described herein, the first target-binding domain, the second target-binding domain, and the one or more additional target-binding domains are each an antigen-binding domain. In some embodiments of any of the methods described herein, the antigen-binding domain includes a scFv.

[0111] In some embodiments of any of the methods described herein, one or more of the first target-binding domain, the second target-binding domain, and the one or more target-binding domains bind specifically to a target selected from the group of: CD16a, CD33, CD20, CD19, CD22, CD123, PDL-1, TIGIT, PD-1, TIM3, CTLA4, MICA, MICB, IL-6, IL-8, TNFα, CD26, CD36, ULBP2, CD30, CD200, IGF-1R, MUC4AC, MUC5AC, Trop-2, CMET, EGFR, HER1, HER2, HER3, PSMA, CEA, B7H3, EPCAM, BCMA, P-cadherin, CEACAM5, a UL16-binding protein, HLA-DR, DLL4, TYRO3, AXL, MER, CD122, CD155, PDGF-DD, a ligand of TGF-β receptor II (TGF-βRII), a ligand of TGF-βRIII, a ligand of DNAM1, a ligand of NKp46, a ligand of NKp44, a ligand of NKG2D, a ligand of NKp30, a ligand for a scMHCI, a ligand for a scMHCII, a ligand for a scTCR, a receptor for PDGF-DD, a receptor for stem cell factor (SCF), a receptor for stem cell-like tyrosine kinase 3 ligand (FLT3L), a receptor for MICA, a receptor for MICB, a receptor for a ULP16-binding protein, a receptor for CD155, and a receptor for CD122.

[0112] In some embodiments of any of the methods described herein, one or more of the first target-binding domain, the second target-binding domain, and the one or more additional target-binding domains is a soluble interleukin or cytokine protein. In some embodiments of any of the methods described herein, the soluble interleukin or cytokine protein is selected from the group of: IL-1, IL-2, IL-3, IL-7, IL-8, IL-10, IL-12, IL-15, IL-17, IL-18, IL-21, PDGF-DD, and SCF.

[0113] In some embodiments of any of the methods described herein, one or more of the first target-binding domain, the second target-binding domain, and the one or more additional target-binding domains is a soluble interleukin or cytokine receptor. In some embodiments of any of the methods described herein, the soluble receptor a soluble TGF-β receptor II (TGF-βRII) a soluble TGF-βRIII, a soluble receptor for TNFα, a soluble receptor for IL-4, or a soluble receptor for IL-10.

[0114] In some embodiments of any of the methods described herein, the soluble tissue factor domain is a soluble human tissue factor domain. In some embodiments of any of the methods described herein, the soluble human tissue factor domain includes a sequence that is at least 80% identical to SEQ ID NO: 93. In some embodiments of any of the methods described herein, the soluble human tissue factor domain includes a sequence that is at least 90% identical to SEQ ID NO: 93. In some embodiments of any of the methods described herein, the soluble human tissue factor domain includes a sequence that is at least 95% identical to SEQ ID NO: 93.

[0115] In some embodiments of any of the methods described herein, the soluble human tissue factor domain does not include one or more of: a lysine at an amino acid position that corresponds to amino acid position 20 of mature wildtype human tissue factor protein; an isoleucine at an amino acid position that corresponds to amino acid position 22 of mature wildtype human tissue factor protein; a tryptophan at an amino acid position that corresponds to amino acid position 45 of mature wildtype human tissue factor protein; an aspartic acid at an amino acid position that corresponds to amino acid position 58 of mature wildtype human tissue factor protein; a tyrosine at an amino acid position that corresponds to amino acid position 94 of mature wildtype human tissue factor protein; an arginine at an amino acid position that corresponds to amino acid position 135 of mature wildtype human tissue factor protein; and a phenylalanine at an amino acid position that corresponds to amino acid position 140 of mature wildtype human tissue factor protein.

[0116] In some embodiments of any of the methods described herein, the soluble human tissue factor domain does not include any of: a lysine at an amino acid position that corresponds to amino acid position 20 of mature wildtype human tissue factor protein; an isoleucine at an amino acid position that corresponds to amino acid position 22 of mature wildtype human tissue factor protein; a tryptophan at an amino acid position that corresponds to amino acid position 45 of mature wildtype human tissue factor protein; an aspartic acid at an amino acid position that corresponds to amino acid position 58 of mature wildtype human tissue factor protein; a tyrosine at an amino acid position that corresponds to amino acid position 94 of mature wildtype human tissue factor protein; an arginine at an amino acid position that corresponds to amino acid position 135 of mature wildtype human tissue factor protein; and a phenylalanine at an amino acid position that corresponds to amino acid position 140 of mature wildtype human tissue factor protein.

[0117] In some embodiments of any of the methods described herein, the soluble tissue factor domain is not capable of binding to Factor VIIa. In some embodiments of any of the methods described herein, the soluble tissue factor domain does not convert inactive Factor X into Factor Xa. In some embodiments of any of the methods described herein, the multi-chain chimeric polypeptide does not stimulate blood coagulation in a mammal. In some embodiments of any of the methods described herein, the pair of affinity domains is a sushi domain from an alpha chain of human IL-15 receptor (IL-15Rα) and a soluble IL-15. In some embodiments of any of the methods described herein, the soluble IL-15 has a D8N or D8A amino acid substitution. In some embodiments of any of the methods described herein, the human IL-15Rα is a mature full-length IL-15Rα.

[0118] In some embodiments of any of the methods described herein, the pair of affinity domains is selected from the group of: barnase and barnstar, a PKA and an AKAP, adapter/docking tag modules based on mutated RNase I fragments, and SNARE modules based on interactions of the proteins syntaxin, synaptotagmin, synaptobrevin, and SNAP25.

[0119] In some embodiments of any of the methods described herein, at least one of the one or more NK cell activating agent(s) is a multi-chain chimeric polypeptide that includes: (a) a first and second chimeric polypeptides, where each includes: (i) a first target-binding domain; (ii) a Fc domain; and (iii) a first domain of a pair of affinity domains; and (b) a third and fourth chimeric polypeptide, where each includes: (i) a second domain of a pair of affinity domains; and (ii) a second target-binding domain, where the first and second chimeric polypeptides and the third and fourth chimeric polypeptides associate through the binding of the first domain and the second domain of the pair of affinity domains, and the first and second chimeric polypeptides associate through their Fc domains.

[0120] In some embodiments of any of the methods described herein, the first target-binding domain and the Fc domain directly abut each other in the first and second chimeric polypeptides. In some embodiments of any of the methods described herein, the first and second chimeric polypeptides further include a linker sequence between the first target-binding domain and the Fc domain in the first and second chimeric polypeptides. In some embodiments of any of the methods described herein, the Fc domain and the first domain of the pair of affinity domains directly abut each other in the first and second chimeric polypeptides. In some embodiments of any of the methods described herein, the first chimeric polypeptide further includes a linker sequence between the Fc domain and the first domain of the pair of affinity domains in the first and second chimeric polypeptides.

[0121] In some embodiments of any of the methods described herein, the second domain of the pair of affinity domains and the second target-binding domain directly abut each other in the third and fourth chimeric polypeptides. In some embodiments of any of the methods described herein, the third and fourth chimeric polypeptides further include a linker sequence between the second domain of the pair of affinity domains and the second target-binding domain in the third and fourth chimeric polypeptides.

[0122] In some embodiments of any of the methods described herein, the first target-binding domain and the second target-binding domain bind specifically to the same antigen. In some embodiments of any of the methods described herein, the first target-binding domain and the second target-binding domain bind specifically to the same epitope. In some embodiments of any of the methods described herein, the first target-binding domain and the second target-binding domain include the same amino acid sequence.

[0123] In some embodiments of any of the methods described herein, the first target-binding domain and the second target-binding domain bind specifically to different antigens. In some embodiments of any of the methods described herein, one or both of the first target-binding domain and the second target-binding domain is an antigen-binding domain. In some embodiments of any of the methods described herein, the first target-binding domain and the second target-binding domain are each antigen-binding domains. In some embodiments of any of the methods described herein, the antigen-binding domain includes a scFv or a single domain antibody.

[0124] In some embodiments of any of the methods described herein, one or both of the first target-binding domain and the second target-binding domain bind specifically to a target selected from the group of: CD16a, CD33, CD20, CD19, CD22, CD123, PDL-1, TIGIT, PD-1, TIM3, CTLA4, MICA, MICB, IL-6, IL-8, TNFα, CD26, CD36, ULBP2, CD30, CD200, IGF-1R, MUC4AC, MUC5AC, Trop-2, CMET, EGFR, HER1, HER2, HER3, PSMA, CEA, B7H3, EPCAM, BCMA, P-cadherin, CEACAM5, a UL16-binding protein, HLA-DR, DLL4, TYRO3, AXL, MER, CD122, CD155, PDGF-DD, a ligand of TGF-β receptor II (TGF-βRII), a ligand of TGF-βRIII, a ligand of DNAM1, a ligand of NKp46, a ligand of NKp44, a ligand of NKG2D, a ligand of NKp30, a ligand for a scMHCI, a ligand for a scMHCII, a ligand for a scTCR, a receptor for PDGF-DD, a receptor for stem cell factor (SCF), a receptor for stem cell-like tyrosine kinase 3 ligand (FLT3L), a receptor for MICA, a receptor for MICB, a receptor for a ULP16-binding protein, a receptor for CD155, and a receptor for CD122.

[0125] In some embodiments of any of the methods described herein, one or both of the first target-binding domain and the second target-binding domain is a soluble interleukin or cytokine protein. In some embodiments of any of the methods described herein, the soluble interleukin or cytokine protein is selected from the group of: IL-1, IL-2, IL-3, IL-7, IL-8, IL-10, IL-12, IL-15, IL-17, IL-18, IL-21, PDGF-DD, and SCF.

[0126] In some embodiments of any of the methods described herein, one or both of the first target-binding domain and the second target-binding domain is a soluble interleukin or cytokine receptor. In some embodiments of any of the methods described herein, the soluble receptor is a soluble TGF-β receptor II (TGF-βRII) a soluble TGF-βRIII, a soluble receptor for TNFα, a soluble receptor for IL-4, or a soluble receptor for IL-10.

[0127] In some embodiments of any of the methods described herein, the soluble tissue factor domain is a soluble human tissue factor domain that does not stimulate blood coagulation. In some embodiments of any of the methods described herein, the soluble tissue factor domain comprises or consists of a sequence from a wildtype soluble human tissue factor.

[0128] As used herein, the term “chimeric” refers to a polypeptide that includes amino acid sequences (e.g., domains) originally derived from two different sources (e.g., two different naturally-occurring proteins, e.g., from the same or different species). For example, a chimeric polypeptide can include domains from at least two different naturally occurring human proteins. In some examples, a chimeric polypeptide can include a domain that is a synthetic sequence (e.g., a scFv) and a domain that is derived from a naturally-occurring protein (e.g., a naturally-occurring human protein). In some embodiments, a chimeric polypeptide can include at least two different domains that are synthetic sequences (e.g., two different scFvs).

[0129] An “activated NK cell” is a NK cell demonstrating increased expression levels of two or more (e.g., three, four, five, or six) of CD25, CD69, MTOR-C1, SREBP, IFN-γ, and a granzyme (e.g., granzyme B), e.g., as compared to a resting NK cell. Exemplary methods for identifying the expression levels of CD25, CD69, MTOR-C1, SREBP, IFN-γ, and a granzyme (e.g., granzyme B) are described herein.

[0130] A “resting NK cell” is a NK cell that has a reduced expression of two or more (e.g., three, four, five, or six) of CD25, CD69, MTOR-C1, SREBP, IFN-γ, and a granzyme (e.g., granzyme B), e.g., as compared to an activated NK cell.

[0131] An “NK cell activating agent” is an agent that induces or promotes (alone or in combination with additional NK cell activating agents) a resting NK cell to develop into an activated NK cell. Non-limiting examples and aspects of NK cell activating agents are described herein.

[0132] An “antigen-binding domain” is one or more protein domain(s) (e.g., formed from amino acids from a single polypeptide or formed from amino acids from two or more polypeptides (e.g., the same or different polypeptides) that is capable of specifically binding to one or more different antigen(s). In some examples, an antigen-binding domain can bind to an antigen or epitope with specificity and affinity similar to that of naturally-occurring antibodies. In some embodiments, the antigen-binding domain can be an antibody or a fragment thereof. In some embodiments, an antigen-binding domain can include an alternative scaffold. Non-limiting examples of antigen-binding domains are described herein. Additional examples of antigen-binding domains are known in the art.

[0133] A “soluble tissue factor domain” refers to a polypeptide having at least 70% identity (e.g., at least 75% identity, at least 80% identity, at least 85% identity, at least 90% identity, at least 95% identity, at least 99% identity, or 100% identical) to a segment of a wildtype mammalian tissue factor protein (e.g., a wildtype human tissue factor protein) that lacks the transmembrane domain and the intracellular domain. Non-limiting examples of soluble tissue factor domains are described herein.

[0134] The term “soluble interleukin protein” is used herein to refer to a mature and secreted interleukin protein or a biologically active fragment thereof. In some examples, a soluble interleukin protein can include a sequence that is at least 70% identical, at least 75% identical, at least 80% identical, at least 85% identical, at least 90% identical, at least 95% identical, at least 99% identical, or 100% identical to a wildtype mature and secreted mammalian interleukin protein (e.g., a wildtype human interleukin protein) and retains its biological activity. Non-limiting examples of soluble interleukin proteins are described herein.

[0135] The term “soluble cytokine protein” is used herein to refer to a mature and secreted cytokine protein or a biologically active fragment thereof. In some examples, a soluble cytokine protein can include a sequence that is at least 70% identical, at least 75% identical, at least 80% identical, at least 85% identical, at least 90% identical, at least 95% identical, at least 99% identical, or 100% identical to a wildtype mature and secreted mammalian interleukin protein (e.g., a wildtype human interleukin protein) and retains its biological activity. Non-limiting examples of soluble cytokine proteins are described herein.

[0136] The term “soluble interleukin receptor” is used herein in the broadest sense to refer to a polypeptide that lacks a transmembrane domain (and optionally an intracellular domain) that is capable of binding one or more of its natural ligands (e.g., under physiological conditions, e.g., in phosphate buffered saline at room temperature). For example, a soluble interleukin receptor can include a sequence that is at least 70% identical (e.g., at least 75% identical, at least 80% identical, at least 85% identical, at least 90% identical, at least 95% identical, at least 99% identical, or 100% identical) to an extracellular domain of wildtype interleukin receptor and retains its ability to specifically bind to one or more of its natural ligands, but lacks its transmembrane domain (and optionally, further lacks its intracellular domain). Non-limiting examples of soluble interleukin receptors are described herein.

[0137] The term “soluble cytokine receptor” is used herein in the broadest sense to refer to a polypeptide that lacks a transmembrane domain (and optionally an intracellular domain) that is capable of binding one or more of its natural ligands (e.g., under physiological conditions, e.g., in phosphate buffered saline at room temperature). For example, a soluble cytokine receptor can include a sequence that is at least 70% identical (e.g., at least 75% identical, at least 80% identical, at least 85% identical, at least 90% identical, at least 95% identical, at least 99% identical, or 100% identical) to an extracellular domain of wildtype cytokine receptor and retains its ability to specifically bind to one or more of its natural ligands, but lacks its transmembrane domain (and optionally, further lacks its intracellular domain). Non-limiting examples of soluble cytokine receptors are described herein.

[0138] The term “antibody” is used herein in its broadest sense and includes certain types of immunoglobulin molecules that include one or more antigen-binding domains that specifically bind to an antigen or epitope. An antibody specifically includes, e.g., intact antibodies (e.g., intact immunoglobulins), antibody fragments, and multi-specific antibodies. One example of an antigen-binding domain is an antigen-binding domain formed by a VH-VL dimer. Additional examples of an antibody are described herein. Additional examples of an antibody are known in the art.

[0139] “Affinity” refers to the strength of the sum total of non-covalent interactions between an antigen-binding site and its binding partner (e.g., an antigen or epitope). Unless indicated otherwise, as used herein, “affinity” refers to intrinsic binding affinity, which reflects a 1:1 interaction between members of an antigen-binding domain and an antigen or epitope. The affinity of a molecule X for its partner Y can be represented by the dissociation equilibrium constant (K_{D}). The kinetic components that contribute to the dissociation equilibrium constant are described in more detail below. Affinity can be measured by common methods known in the art, including those described herein. Affinity can be determined, for example, using surface plasmon resonance (SPR) technology (e.g., BIACORE®) or biolayer interferometry (e.g., FORTEBIO®). Additional methods for determining the affinity for an antigen-binding domain and its corresponding antigen or epitope are known in the art.

[0140] A “single-chain polypeptide” as used herein to refers to a single protein chain.

[0141] A “multi-chain polypeptide” as used herein to refers to a polypeptide comprising two or more (e.g., three, four, five, six, seven, eight, nine, or ten) protein chains (e.g., at least a first chimeric polypeptide and a second polypeptide), where the two or more proteins chains associate through non-covalent bonds to form a quaternary structure.

[0142] The term “pair of affinity domains” is two different protein domain(s) that bind specifically to each other with a K_{D} of less than of less than 1×10⁻⁷ M (e.g., less than 1×10⁻⁸ M, less than 1×10⁻⁹M, less than 1×10⁻¹⁰ M, or less than 1×10⁻¹¹M). In some examples, a pair of affinity domains can be a pair of naturally-occurring proteins. In some embodiments, a pair of affinity domains can be a pair of synthetic proteins. Non-limiting examples of pairs of affinity domains are described herein.

[0143] The term “epitope” means a portion of an antigen that specifically binds to an antigen-binding domain. Epitopes can, e.g., consist of surface-accessible amino acid residues and/or sugar side chains and may have specific three-dimensional structural characteristics, as well as specific charge characteristics. Conformational and non-conformational epitopes are distinguished in that the binding to the former but not the latter may be lost in the presence of denaturing solvents. An epitope may comprise amino acid residues that are directly involved in the binding, and other amino acid residues, which are not directly involved in the binding. Methods for identifying an epitope to which an antigen-binding domain binds are known in the art.

[0144] The term “treatment” means to ameliorate at least one symptom of a disorder. In some examples, the disorder being treated is cancer and to ameliorate at least one symptom of cancer includes reducing aberrant proliferation, gene expression, signaling, translation, and/or secretion of factors. Generally, the methods of treatment include administering a therapeutically effective amount of a composition that reduces at least one symptom of a disorder to a subject who is in need of, or who has been determined to be in need of such treatment.

[0145] Unless otherwise defined, all technical and scientific terms used herein have the same meaning as commonly understood by one of ordinary skill in the art to which this invention belongs. Methods and materials are described herein for use in the present invention; other, suitable methods and materials known in the art can also be used. The materials, methods, and examples are illustrative only and not intended to be limiting. All publications, patent applications, patents, sequences, database entries, and other references mentioned herein are incorporated by reference in their entirety. In case of conflict, the present specification, including definitions, will control.

[0146] Other features and advantages of the invention will be apparent from the following detailed description and figures, and from the claims.

### BRIEF DESCRIPTION OF DRAWINGS

[0147] FIGS. 1A-1B show the results of immunostimulation of an exemplary multi-chain polypeptide in C57BL/6 mice. FIG. 1A shows the spleen weight of mice treated with increasing dosage of the exemplary multi-chain polypeptide as compared to mice treated with the control solution. FIG. 1B shows the percentages of immune cell types present in the spleen of mice treated with increasing dosage of the exemplary multi-chain polypeptide as compared to mice treated with the control solution.

[0148] FIGS. 2A-2B show the duration of immunostimulation of an exemplary multi-chain polypeptide in C57BL/6 mice. FIG. 2A shows the spleen weight over a period of 92 hours in mice treated with 3 mg/kg of the exemplary multi-chain polypeptide. FIG. 2B shows the percentages of immune cell types present in the spleen over a period of 92 hours in mice treated with 3 mg/kg of the exemplary multi-chain polypeptide.

[0149] FIGS. 3A-3B show the expression of Ki67 and Granzyme B in immune cells induced by the exemplary multi-chain polypeptide. FIG. 3A shows the expression of Ki67 in CD4⁺ T cells, CD8⁺ T cells, natural killer (NK) cells, and CD19⁺ B cells at various time points post-treatment with the multi-chain polypeptide. FIG. 3B shows the expression of Granzyme B in CD4⁺ T cells, CD8⁺ T cells, natural killer (NK) cells, and CD19⁺ B cells at various time points post-treatment with the multi-chain polypeptide.

[0150] FIG. 4 shows the effect of tumor inhibition by splenocytes prepared from mice treated with an exemplary multi-chain polypeptide at various time points after treatment.

[0151] FIGS. 5A-5B show the percentages and the proliferation rate of CD4⁺ T cells, CD8⁺ T cells, Natural Killer (NK) cells, and CD19⁺ B cells in the blood of B6.129P2-ApoE^{tm1Unc}/J mice (purchased from The Jackson Laboratory) fed a control diet, a high fat diet and untreated, and mice fed a high fat diet and treated with TGFRt15-TGFRs, 2t2, or 21t15-TGFRs. FIG. 5A shows the percentages of the different cell types in each control and experimental group. FIG. 5B shows the proliferation rate of the of the different cell types in each control and experimental group.

[0152] FIGS. 6A-6E show exemplary physical appearance of mice fed either a control or high fat diet and were either untreated or treated with TGFRt15-TGFRs, 2t2, or 21t15-TGFRs.

[0153] FIG. 7 shows the fasting body weight of mice fed either a control or a high fat diet and were either untreated or treated with TGFRt15-TGFRs, 2t2, or 21t15-TGFRs.

[0154] FIG. 8 shows the fasting blood glucose levels of mice fed either a control or a high fat diet and were either untreated or treated with TGFRt15-TGFRs, 2t2, or 21t15-TGFRs.

[0155] FIGS. 9A-9F show chemotherapy-induced senescent B16F10 cells and expression of senescent genes. FIG. 9A shows chemotherapy induction of senescent B16F10 cells visualized using SA β-gal staining. FIGS. 9B-9F show expression of p21, IL6, DPP4, RATE1E, and ULBP1 over time in the chemotherapy-induced senescent B16F10 cells.

[0156] FIGS. 10A-10F show colony formation and expression of stem cell markers by chemotherapy-induced senescent B16F10 cells. FIG. 10A shows colony formation by chemotherapy-induced senescent B16F10 cells. FIGS. 10B and 10C show expression of Oct4 mRNA and Notch4 mRNA by chemotherapy-induced senescent B16F10 cells as compared to control B16F10 cells. FIGS. 10D-10F show percentage of chemotherapy-induced senescent B16F10 cells double-positive for two out of the three stem cell markers including CD44, CD24, and CD133.

[0157] FIGS. 11A-11C show migratory and invasive properties of chemotherapy-induced senescent B16F10 cells. FIG. 11A shows the results of a migration assay comparing chemotherapy-induced senescent cells with stem cell properties (B16F10-SNC-CSC) with control B16F10 cells. FIGS. 11B and 11C show the results of an invasion assay comparing chemotherapy-induced senescent cells with stem cell properties (B16F10-SNC-CSC) with control B16F10 cells.

[0158] FIGS. 12A and 12B show in vitro expanded NK cells and their cytotoxicity against chemotherapy-induced senescent cells with stem cell properties (B16F10-SNC-CSC) or control B16F10 cells. FIG. 12A shows an exemplary schematic of a process of obtaining in vitro expanded NK cells. FIG. 12 B shows cytotoxicity of the expanded NK cells against chemotherapy-induced senescent cells with stem cell properties (B16F10-SNC-CSC) or control B16F10 cells.

[0159] FIGS. 13A-13C show results of combination treatment using a mouse melanoma model. FIG. 13A shows an exemplary schematic for treating melanoma in a mouse model. FIGS. 13B and 13C show the change in tumor volume over time with combination treatments including TGFRt15-TGFRs as compared to chemotherapy or TA99 treatment alone.

[0160] FIG. 14 shows induction of senescence in the human pancreatic tumor cell line SW1990 and expression of CD44 and CD24 in senescent SW1990 cells as compared to control SW1990 cells.

[0161] FIG. 15 shows expression of senescent markers by chemotherapy-induced senescent SW1990 cells.

[0162] FIG. 16 shows the cytotoxicity of in vitro activated human NK cells against chemotherapy-induced senescent SW1990 cells or control SW1990 cells.

[0163] FIG. 17 shows a schematic diagram of an exemplary IL-12/IL-15RαSu DNA construct.

[0164] FIG. 18 shows a schematic diagram of an exemplary IL-18/TF/IL-15 DNA construct.

[0165] FIG. 19 shows a schematic diagram of the interaction between the exemplary IL-12/IL-15RαSu and IL-18/TF/IL-15 DNA constructs.

[0166] FIG. 20 shows a schematic diagram of the interaction between the exemplary IL-12/IL-15RαSu and IL-18/TF/IL-15 fusion proteins resulting in IL-18/TF/IL-15:IL-12/IL-15RαSu complex (18t15-12s).

[0167] FIG. 21 shows a chromatograph of 18t15-12s purification elution from an anti-TF antibody affinity column.

[0168] FIG. 22 shows an exemplary chromatographic profile of anti-TF Ab/SEC-purified 18t15-12s protein following elution on an analytical size exclusion column, demonstrating separation of monomeric multiprotein 18t15-12s complexes from protein aggregates.

[0169] FIG. 23 shows an example of a 4-12% SDS-PAGE of the 18t15-12s complex following disulfide bond reduction. Lane 1: SeeBlue Plus2 marker; Lane 2: anti-TF Ab-purified 18t15-12s (0.5 μg); Lane 3: anti-TF Ab-purified 18t15-12s (1 μg).

[0170] FIG. 24 shows SDS PAGE analysis of deglycosylated and non-deglycosylated 18t15-12s. Lane 1: anti-TF Ab-purified 18t15-12s (0.5 μg), non-deglycosylated; Lane 2: anti-TF Ab-purified 18t15-12s (1 μg), non-deglycosylated; Lane 3: 18t15-12s (1 μg), deglycosylated, Lane 4: Mark12 unstained maker.

[0171] FIG. 25 shows a sandwich ELISA for the 18t15-12s complex, comprising an anti-human tissue factor antibody capture and a biotinylated anti-human IL-12 detection antibody (BAF 219).

[0172] FIG. 26 shows a sandwich ELISA for the 18t15-12s complex, comprising an anti-human tissue factor antibody capture and a biotinylated anti-human IL-15 detection antibody (BAM 247).

[0173] FIG. 27 shows a sandwich ELISA for the 18t15-12s complex, comprising an anti-human tissue factor antibody capture and a biotinylated anti-human IL-18 detection antibody (D045-6).

[0174] FIG. 28 shows a sandwich ELISA for the 18t15-12s complex, comprising an anti-human tissue factor (143) capture antibody and an anti-human tissue factor detection antibody.

[0175] FIG. 29 shows proliferation of IL-15-dependent 32Dβ cells mediated by the 18t15-12s complex (open squares) and recombinant IL-15 (black squares).

[0176] FIG. 30 shows biological activity of IL-18 within the 18t15-12s complex (open squares), where recombinant IL-18 (black squares) and recombinant IL-12 (black circles) serve as positive and negative controls, respectively.

[0177] FIG. 31 shows biological activity of IL-12 within the 18t15-12s complex (open squares), where recombinant IL-12 (black circles) and recombinant IL-18 (open squares) serve as positive and negative controls, respectively.

[0178] FIGS. 32A and 32B show cell-surface expression of CD25 on NK cells induced by the 18t15-12s complex and cell-surface CD69 expression of NK cells induced by the 18t15-12s complex.

[0179] FIG. 33 shows a flow cytometry graph of intracellular IFN-γ expression of NK cells induced by the 18t15-12s complex.

[0180] FIG. 34 shows cytotoxicity of 18t15-12s induced human NK cells against K562 cells.

[0181] FIG. 35 shows a schematic diagram of an exemplary IL-12/IL-15RαSu/αCD16 DNA construct.

[0182] FIG. 36 shows a schematic diagram of an exemplary IL-18/TF/IL-15 DNA construct.

[0183] FIG. 37 shows a schematic diagram of the interaction between the exemplary IL-12/IL-15RαSu/αCD16scFv and IL-18/TF/IL-15 DNA constructs.

[0184] FIG. 38 shows a schematic diagram of an exemplary 18t15-12s/αCD16 protein complex.

[0185] FIG. 39 shows a sandwich ELISA for the 18t15-12s16 complex, comprising an anti-human tissue factor antibody capture antibody and a biotinylated anti-human IL-12 (BAF 219) (dark line) or an anti-human tissue factor detection antibody (light line).

[0186] FIG. 40 shows a schematic diagram of an exemplary TGFβRII/IL-15RαSu DNA construct.

[0187] FIG. 41 shows a schematic diagram of an exemplary IL-21/TF/IL-15 construct.

[0188] FIG. 42 shows a schematic diagram of the interaction between the exemplary IL-IL-21/TF/IL-15 and TGFβRII/IL-15RαSu constructs.

[0189] FIG. 43 shows a schematic diagram of the interaction between the exemplary TGFβRII/IL-15RαSu and IL-21/TF/IL-15 fusion proteins, resulting in an IL-21/TF/IL-15/TGFβRII/IL-15RαSu complex (21t15-TGFRs).

[0190] FIG. 44 shows a chromatograph of 21t15-TGFRs purification elution from an anti-TF antibody affinity column.

[0191] FIG. 45 shows an exemplary 21t15-TGFRs size exclusion chromatograph showing a main protein peak and a high molecular weight peak

[0192] FIG. 46 shows an example of a 4-12% SDS-PAGE of the 21t15-TGFRs complex following disulfide bond reduction. Lane 1: Mark12 unstained marker (numbers on the left side indicate molecular weights in kDa); Lane 2: 21t15-TGFRs (0.5 μg); Lane 3: 21t15-TGFRs (1 μg); Lane 4: 21t15-TGFRs, deglycosylated (1 μg), wherein the MW was the expected size of 53 kDa and 39.08 kDa.

[0193] FIG. 47 shows a sandwich ELISA for the 21t15-TGFRs complex, comprising an anti-human tissue factor capture and a biotinylated anti-human IL-21 detection antibody (13-7218-81, BioLegend).

[0194] FIG. 48 shows a sandwich ELISA for the 21t15-TGFRs complex, comprising an anti-human tissue factor antibody capture and a biotinylated anti-human IL-15 detection antibody (BAM 247, R&D Systems).

[0195] FIG. 49 shows a sandwich ELISA for the 21t15-TGFRs complex, comprising an anti-human tissue factor antibody capture and a biotinylated anti-human TGFβRII detection antibody (BAF241, R&D Systems).

[0196] FIG. 50 shows a sandwich ELISA for the 21t15-TGFRs complex, comprising an anti-human tissue factor (143) capture antibody and an anti-human tissue factor detection antibody.

[0197] FIG. 51 shows IL-15-dependent proliferation of 32Dβ cells mediated by the 21t15-TGFRs complex (open squares) compared to IL-15 (black squares).

[0198] FIG. 52 shows biological activity of the TGFβRII domain within the 21t15-TGFRs complex (open squares). TGFβRII/Fc (black squares) served as a positive control.

[0199] FIG. 53 shows a flow cytometry graph of cell-surface CD25 expression of NK cells induced by the 21t15-TGFRs complex.

[0200] FIG. 54 shows a flow cytometry graph of cell-surface CD69 expression of NK cells induced by the 21t15-TGFRs complex.

[0201] FIG. 55 shows a flow cytometry graph of intracellular IFN-γ expression of NK cells induced by the 21t15-TGFRs complex.

[0202] FIG. 56 shows cytotoxicity of 21t15-TGFRs-induced human NK cells against K562 cells.

[0203] FIG. 57 are schematic diagrams of an exemplary αCD3scFv/TF/αCD28scFv single-chain chimeric polypeptide.

[0204] FIG. 58 is a chromatograph showing the elution of an exemplary αCD3scFv/TF/αCD28scFv single-chain chimeric polypeptide from an anti-tissue factor affinity column.

[0205] FIG. 59 is a chromatograph showing the elution of a Superdex 200 Increase 10/300 GL gel filtration column loaded with an exemplary αCD3scFv/TF/αCD28scFv single-chain chimeric polypeptide.

[0206] FIG. 60 is a sodium dodecyl sulfate polyacrylamide gel (4-12% NuPage Bis-Tris gel) of an exemplary αCD3scFv/TF/αCD28scFv single-chain chimeric polypeptide purified using an anti-tissue factor affinity column.

[0207] FIG. 61 is a graph showing the ELISA quantitation of an exemplary αCD3scFv/TF/αCD28scFv single-chain chimeric polypeptide performed using the methods described in Example 1. Purified tissue factor was used as the control.

[0208] FIG. 62 is a graph showing the ability of an exemplary αCD3scFv/TF/αCD28scFv single-chain chimeric polypeptide to stimulate CD25 expression in CD4⁺ T-cells isolated from blood from two donors. The experiments were performed as described in Example 2.

[0209] FIG. 63 is a graph showing the ability of an exemplary αCD3scFv/TF/αCD28scFv single-chain chimeric polypeptide to stimulate CD25 expression in CD8⁺ T-cells isolated from blood from two donors. The experiments were performed as described in Example 2.

[0210] FIG. 64 is a graph showing the ability of an exemplary αCD3scFv/TF/αCD28scFv single-chain chimeric polypeptide to stimulate CD69 expression in CD4⁺ T-cells isolated from blood from two donors. The experiments were performed as described in Example 2.

[0211] FIG. 65 shows a schematic diagram of an exemplary IL-7/IL-15RαSu DNA construct.

[0212] FIG. 66 shows a schematic diagram of an exemplary IL-21/TF/IL-15 DNA construct.

[0213] FIG. 67 shows a schematic diagram of the interaction between the exemplary IL-7/IL-15RαSu and IL-21/TF/IL-15 DNA constructs.

[0214] FIG. 68 shows a schematic diagram of the interaction between the exemplary IL-7/IL-15RαSu and IL-21/TF/IL-15 fusion proteins resulting in an IL-21/TF/IL-15:IL-7/IL-15RαSu complex (21t15-7s).

[0215] FIG. 69 shows a schematic diagram of an exemplary IL-21/IL-15RαSu DNA construct.

[0216] FIG. 70 shows a schematic diagram of an exemplary IL-7/TF/IL-15 DNA construct.

[0217] FIG. 71 shows a schematic diagram of the interaction between the exemplary IL-21/IL-15RαSu and IL-7/TF/IL-15 DNA constructs.

[0218] FIG. 72 shows a schematic diagram of the interaction between the exemplary IL-21/IL-15RαSu and IL-7/TF/IL-15 fusion proteins resulting in an IL-7/TF/IL-15:IL-21/IL-15RαSU complex (7t15-21s).

[0219] FIG. 73 shows the oxygen consumption rate (OCR) in pmoles/min for human NK cells isolated from blood (2×10⁶ cells/mL) of two different donors.

[0220] FIG. 74 shows the extracellular acidification rate (ECAR) in mpH/minute for human NK cells isolated from blood (2×10⁶ cells/mL) of two different donors.

[0221] FIG. 75 shows a schematic of the 7t15-16s21 construct.

[0222] FIG. 76 shows an additional schematic of the 7t15-16s21 construct.

[0223] FIGS. 77A and 77B show binding of 7t15-16s21 to CHO cells expressing human CD16b as compared to a control protein.

[0224] FIGS. 78A-78C are results from ELISA experiments using antibodies against IL-15, IL-21, and IL-7 in detecting 7t15-16s21.

[0225] FIG. 79 shows results of the 32Dβ cell proliferation assay with 7t15-16s21 or recombinant IL-15.

[0226] FIG. 80 shows the chromatographic profile of 7t15-16s21 protein containing cell culture supernatant following binding and elution on anti-TF antibody resin.

[0227] FIG. 81 shows the analytical SEC Profile of 7t15-16s21.

[0228] FIG. 82 shows a schematic of the TGFRt15-16s21 construct.

[0229] FIG. 83 shows an additional schematic of the TGFRt15-16s21 construct.

[0230] FIGS. 84A and 84B show binding affinity of TGFRT15-16521 and 7t15-21s with CHO cells expressing human CD16b. FIG. 84A shows binding affinity of TGFRT15-16S21 with CHO cells expressing human CD16b. FIG. 84B shows binding affinity of 7t15-21s with CHO cells expressing human CD16b.

[0231] FIG. 85 shows results of TGFβ1 inhibition by TGFRt15-16s21 and TGFR-Fc.

[0232] FIG. 86 shows results of 32Dβ cell proliferation assay with TGFRt15-16s21 or recombinant IL-15.

[0233] FIGS. 87A-87C show results of detecting IL-15, IL-21, and TGFβRII in TGFRt15-16s21 with corresponding antibodies using ELISA.

[0234] FIG. 88 shows the chromatographic profile of TGFRt15-16s21 protein containing cell culture supernatant following binding and elution on anti-TF antibody resin.

[0235] FIG. 89 shows results of a reduced SDS-PAGE analysis of TGFRt15-16s21.

[0236] FIG. 90 shows a schematic of the 7t15-7s construct.

[0237] FIG. 91 shows an additional schematic of the 7t15-7s construct.

[0238] FIG. 92 shows the chromatographic profile of 7t15-7s protein containing cell culture supernatant following binding and elution on anti-TF antibody resin.

[0239] FIG. 93 shows detection of TF, IL-15 and IL-7 in 7t15-7s using ELISA.

[0240] FIGS. 94A and 94B show spleen weight and the percentages of immune cell types in 7t15-7s-treated and control-treated mice. FIG. 94A shows spleen weight in mice treated with 7t15-7s as compared to PBS control. FIG. 94B shows the percentage of CD4⁺ T cells, CD8⁺ T cells, and NK cells in mice treated with 7t15-7s as compared to PBS control.

[0241] FIG. 95 shows a schematic of the TGFRt15-TGFRs construct.

[0242] FIG. 96 shows an additional schematic of the TGFRt15-TGFRs construct.

[0243] FIG. 97 shows results of TGFβ1 inhibition by TGFRt15-TGFRs and TGFR-Fc.

[0244] FIG. 98 shows results of 32Dβ cell proliferation assay with TGFRt15-TGFRs or recombinant IL-15

[0245] FIGS. 99A and 99B show results of detecting IL-15 and TGFβRII in TGFRt15-TGFRs with corresponding antibodies using ELISA.

[0246] FIG. 100 is a line graph showing the chromatographic profile of TGFRt15-TGFRs protein containing cell culture supernatant following binding and elution on anti-TF antibody resin.

[0247] FIG. 101 shows the analytical SEC profile of TGFRt15-TGFRs.

[0248] FIG. 102 shows TGFRt15-TGFRs before and after deglycosylation as analyzed by reduced SDS-PAGE.

[0249] FIGS. 103A and 103B show spleen weight and the percentages of immune cell types in TGFRt15-TGFRs-treated and control-treated mice. FIG. 103A shows spleen weight in mice treated with TGFRt15-TGFRs as compared to PBS control. FIG. 103B shows the percentage of CD4⁺ T cells, CD8⁺ T cells, and NK cells in mice treated with TGFRt15-TGFRs as compared to PBS control.

[0250] FIGS. 104A and 104B show the spleen weight and immunostimulation over 92 hours in mice treated with TGFRt15-TGFRs. FIG. 104A shows spleen weight of mice treated with TGFRt15-TGFRs at 16, 24, 48, 72, and 92 hours after treatment. FIG. 104B shows the percentages of immune cells in mice treated with TGFRt15-TGFRs at 16, 24, 48, 72, and 92 hours after treatment.

[0251] FIGS. 105A and 105B show Ki67 and Granzyme B expression in mice treated with TGFRt15-TGFRs over time.

[0252] FIG. 106 shows enhancement of cytotoxicity of splenocytes by TGFRt15-TGFRs in C57BL/6 Mice.

[0253] FIG. 107 shows changes in tumor size in response to PBS treatment, chemotherapy alone, TGFRt15-TGFRs alone, or chemotherapy and TGFRt15-TGFRs combination, in a pancreatic cancer mouse model.

[0254] FIG. 108 shows the cytotoxicity of NK cells isolated from mice treated with TGFRt15-TGFRs.

[0255] FIG. 109 shows a schematic of the 7t15-21s137L (long version) construct.

[0256] FIG. 110 shows an additional schematic of the 7t15-21s137L (long version) construct.

[0257] FIG. 111 is a line graph showing the chromatographic profile of 7t15-21s137L (long version) protein containing cell culture supernatant following binding and elution on anti-TF antibody resin.

[0258] FIG. 112 shows the analytical SEC profile of 7t15-21s137L (long version).

[0259] FIG. 113 shows binding of 7t15-21s137L (short version) to CD137L (4.1BBL)

[0260] FIGS. 114A-114C show detection of IL-15, IL21, and IL7 in 7t15-21s137L (short version) with ELISA. FIG. 114A shows detection of IL-15 in 7t15-21s137L (short version) with ELISA. FIG. 114B shows detection of IL21 in 7t15-21s137L (short version) with ELISA. FIG. 114C shows detection of IL7 in 7t15-21s137L (short version) with ELISA.

[0261] FIG. 115 shows results from a CTLL-2 cell proliferation assay.

[0262] FIG. 116 shows the activity of 7t15-1s137L (short version) in promoting IL21R containing B9 cell proliferation.

[0263] FIG. 117 shows a schematic of the 7t15-TGFRs construct.

[0264] FIG. 118 shows an additional schematic of the 7t15-TGFRs construct.

[0265] FIG. 119 shows results of TGFβ1 inhibition by 7t15-TGFRs and TGFR-Fc.

[0266] FIGS. 120A-120C show detection of IL-15, TGFβRII, and IL-7 in 7t15-TGFRs with ELISA.

[0267] FIG. 121 shows results of a 32Dβ cell proliferation assay with 7t15-TGFRs or recombinant IL-15.

[0268] FIG. 122 is a line graph showing the chromatographic profile of 7t15-TGFRs protein containing cell culture supernatant following binding and elution on anti-TF antibody resin.

[0269] FIG. 123 shows 7t15-TGFRs before and after deglycosylation as analyzed using reduced SDS-PAGE.

[0270] FIG. 124 shows ELISA detection of IL-7, IL-15 and TGFβRII in the 7t15-TGFRs protein.

[0271] FIGS. 125A and 125B show spleen weight and the percentages of immune cell types in 7t15-TGFRs-treated and control-treated mice. FIG. 125A shows spleen weight in mice treated with 7t15-TGFRs at various dosages, as compared to PBS control. FIG. 125B shows the percentage of CD4⁺ T cells, CD8⁺ T cells, and NK cells in mice treated with 7t15-TGFRs at various dosages, as compared to PBS control.

[0272] FIGS. 126A and 126B show upregulation of CD44 expression of CD4⁺ and CD8⁺ T cells by 7t15-TGFRs in C57BL/6 mice.

[0273] FIGS. 127A and 127B show upregulation of Ki67 expression and Granzyme B expression of CD8⁺ T cells and NK Cells by 7t15-TGFRs in C57BL/6 mice.

[0274] FIG. 128 shows enhancement of cytotoxicity of splenocytes by 7t15-TGFRs in C57BL/6 mice.

[0275] FIG. 129 shows a schematic of the TGFRt15-21s137L construct.

[0276] FIG. 130 shows an additional schematic of the TGFRt15-21s137L construct.

[0277] FIG. 131 is a line graph showing the chromatographic profile of TGFRt15-21s137L protein containing cell culture supernatant following binding and elution on anti-TF antibody resin.

[0278] FIG. 132 shows a schematic of the TGFRt15-TGFRs21 construct.

[0279] FIG. 133 shows an additional schematic of the TGFRt15-TGFRs21 construct.

[0280] FIG. 134 is a line graph showing the chromatographic profile of TGFRt15-TGFRs21 protein containing cell culture supernatant following binding and elution on anti-TF antibody resin.

[0281] FIG. 135 shows TGFRt15-TGFRs21 before and after deglycosylation as analyzed by reduced SDS-PAGE.

[0282] FIGS. 136A and 136B show detection of components of TGFRt15-TGFRs21 using ELISA.

[0283] FIGS. 137A and 137B show the percentages and proliferation of CD4⁺ T cells, CD8⁺ T cells, and natural killer (NK) cells present in the spleen of control-treated and TGFRt15-TGFRs21-treated mice.

[0284] FIG. 138 shows upregulation of Granzyme B expression of splenocytes in mice treated with TGFRt15-TGFRs21.

[0285] FIG. 139 shows enhancement of cytotoxicity of splenocytes by TGFRt15-TGFRs21 in C57BL/6 Mice.

[0286] FIG. 140 shows a schematic of the TGFRt15-TGFRs16 construct.

[0287] FIG. 141 shows an additional schematic of the TGFRt15-TGFRs16 construct.

[0288] FIG. 142 shows a schematic of the TGFRt15-TGFRs137L construct.

[0289] FIG. 143 shows an additional schematic of the TGFRt15-TGFRs137L construct.

[0290] FIG. 144 are schematic diagrams of an exemplary 2t2 single-chain chimeric polypeptide.

[0291] FIG. 145 shows IL-2 activity in 2t2 as compared to recombinant IL-2 using a 32Dβ cell proliferation assay.

[0292] FIG. 146 shows IL-2 activity in 2t2 as compared to recombinant IL-2 using a CTLL-2 cell proliferation assay.

[0293] FIG. 147 shows the fasting blood glucose levels in ApoE^{-/-} mice fed with standard chow or a high fat diet and treated with a PBS control (untreated) or with 2t2.

[0294] FIG. 148 shows the ratio of CD4⁺CD25⁺ FoxP3⁺ T regulatory cells in blood lymphocytes from ApoE^{-/-} mice fed with standard chow or a high fat diet and treated with a PBS control (untreated) or with 2t2.

[0295] FIG. 149 is a line graph showing the chromatographic profile of 2t2 protein containing cell culture supernatant following binding and elution on anti-TF antibody resin.

[0296] FIG. 150 shows an analytical SEC profile of 2t2.

[0297] FIGS. 151A and 151B show reduced SDS-PAGE analysis of 2t2 before and after deglycosylation. FIG. 151A shows reduced SDS-PAGE analysis of 2t2 before deglycosylation. FIG. 151B shows reduced SDS-PAGE analysis of 2t2 after deglycosylation.

[0298] FIGS. 152A and 152B show results of immunostimulation in C57BL/6 mice using 2t2. FIG. 152A shows spleen weight following treatment with 2t2. FIG. 152B shows the percentages of immune cell types following 2t2 treatment.

[0299] FIG. 153 shows upregulation of CD25 expression of CD4⁺ T cells in mice treated with 2t2.

[0300] FIG. 154 shows the pharmacokinetics of 2t2 in C57BL/6 mice.

[0301] FIGS. 155A and 155B show effects of 2t2 in attenuating the formation of high fat-induced atherosclerotic plaques in ApoE^{-/-} mice. FIG. 155A shows a representative view of atherosclerotic plaques from ApoE^{-/-} mice fed with standard chow or a high fat diet and treated with either PBS control or 2t2. FIG. 155B shows the results of quantitative analysis of atherosclerotic plaques of each group.

[0302] FIG. 156 shows fasting glucose levels in 2t2 treated-mice as compared to control-treated mice.

[0303] FIG. 157 shows the percentage of CD4⁺CD25⁺ FoxP3⁺ Tregs in blood lymphocytes from mice treated with 2t2 and control-treated mice.

[0304] FIG. 158 are schematic diagrams of an exemplary 15t15 single-chain chimeric polypeptide.

[0305] FIG. 159 shows the IL-15 activity of 15t15 as compared to recombinant IL-15 in a 32Dβ cell proliferation assay.

[0306] FIG. 160 is a line graph showing the chromatographic profile of 15t15 protein containing cell culture supernatant following binding and elution on anti-TF antibody resin.

[0307] FIGS. 161A and 161B show reduced SDS-PAGE analysis of 15t15 before and after deglycosylation. FIG. 161A shows reduced SDS-PAGE analysis of 15t15 before deglycosylation. FIG. 161B shows reduced SDS-PAGE analysis of 15t15 after deglycosylation.

[0308] FIGS. 162A and 162B is a set of histograms (FIG. 162A) and a set of graphs (FIG. 162B) showing the change in the surface phenotype of NK cells after stimulation with 18t15-12s, 18t15-12s16, and 7t15-21s+anti-TF antibody.

[0309] FIG. 163 is a set of graphs showing changes in the surface phenotype of lymphocyte populations after stimulation with 18t15-12s, 18t15-12s16, and 7t15-21s.

[0310] FIG. 164 is a set of graphs showing an increase in glycolysis in NK cells following treatment with 18t15-12s.

[0311] FIG. 165 is a set of graphs showing an increase in phospho-STAT4 and phospho-STAT5 levels in NK cells after stimulation with 18t15-12s.

[0312] FIG. 166 is a set of graphs showing that overnight stimulation of NK cells with 18t15-12s enhances cell metabolism.

[0313] FIG. 167A-C is a set of graphs showing immunostimulation in C57BL/6 mice following treatment with 2t2.

[0314] FIG. 168A-B is a set of graphs showing immunostimulation in C57BL/6 mice following treatment with TGFRt15-TGFRs.

[0315] FIG. 169A-C is a set of graphs showing in vivo stimulation of Tregs, NK cells, and CD8⁺ T cells in ApoE^{-/-} mice fed with a Western diet and treated with TGFRt15-TGFRs or 2t2.

[0316] FIG. 170A-B is a set of graphs showing induction of splenocyte proliferation by 2t2 in C57BL/6 mice.

[0317] FIG. 171A-C is a set of graphs showing immunostimulation in C57BL/6 mice following treatment with TGFRt15-TGFRs.

[0318] FIG. 172A-B is a set of graphs showing in vivo induction of proliferation of NK cells and CD8⁺ T cells in ApoE^{-/-} mice fed with a Western diet and treated with TGFRt15-TGFRs or 2t2.

[0319] FIG. 173 is a schematic and a set of graphs showing the persistence of 7t15-21s and anti-TF antibody-expanded NK cells in NSG mice following treatment with 7t15-21, TGFRt15-TGFRs or 2t2.

[0320] FIG. 174A-B is a set of graphs showing enhancement of cytotoxicity of NK cells following treatment of NK cells with TGFRt15-TGFRs.

[0321] FIG. 175A-B is a set of graphs showing enhancement of ADCC activity of NK cells following treatment of NK cells with TGFRt15-TGFRs.

[0322] FIG. 176 is a graph of in vitro killing of senescent B16F10 melanoma cells by TGFRt15-TGFRs/2t2-activated mouse NK cells.

[0323] FIG. 177A-H is a set of graphs showing antitumor activity of TGFRt15-TGFRs plus anti-TRP1 antibody (TA99) in combination with chemotherapy in a melanoma mouse model.

[0324] FIG. 178A-C is a set of graphs showing amelioration of the Western diet-induced hyperglycemia in ApoE^{-/-} mice by 2t2.

[0325] FIG. 179 is a set of graphs showing cell surface staining summarizing the differentiation of NK cells into cytokine-induced memory like NK cells (CIML-NK Cells) after stimulation with 18t15-12s and cultured in rhIL-15.

[0326] FIG. 180 shows upregulation of CD44 memory T cells. The upper panel shows upregulation of CD44 memory T cells upon treatment with TGFRt15-TGFRs. The lower panel shows upregulation of CD44 memory T cells upon treatment with 2t2.

[0327] FIGS. 181A and 181B show improvement in hair regrowth following depilation in mice treated with 2t2 or IL-2. FIG. 181A shows skin pigmentation 10 days after depilation in PBS-, 2t2-, or IL-2-treated mice. FIG. 181B shows percent pigmentation in PBS-, 2t2-, or IL-2-treated mice as analyzed using the ImageJ software.

[0328] FIG. 182 shows skin pigmentation 14 days after depilation in PBS-, 2t2-, or IL-2-treated mice.

[0329] FIG. 183 shows a graph of Factor X (FX) activation following treatment with single-chain or multi-chain chimeric polypeptides.

[0330] FIG. 184 shows clotting time for a buffer with varying concentrations of Innovin in a prothrombin time (PT) test.

[0331] FIG. 185 shows clotting time for multi-chain chimeric polypeptides in a PT Assay.

[0332] FIG. 186 shows clotting time of the multi-chain chimeric polypeptides in a PT assay when mixed with 32DB cells.

[0333] FIG. 187 shows clotting time of multi-chain chimeric polypeptides in a PT assay when mixed with human PBMC.

[0334] FIG. 188 shows binding of 7t15-21s137L (long version) and 7t15-21s137L (short version) to CD137 (4.1BB).

[0335] FIG. 189A-189D show detection of IL7, IL21, IL15, and 4.1BBL in 7t15-21s137L (long version) by the respective antibodies using ELISA.

[0336] FIG. 190 shows IL-15 activity of 7t15-21s137L (long version) and 7t15-21s137L (short version) as evaluated by a IL2Rαβγ-containing CTLL2 cell proliferation assay.

[0337] FIGS. 191A-191C show human blood lymphocyte pStat5a responses in CD4⁺CD25⁻T_{reg} cells, CD4⁺CD25⁻T_{con} cells, or in CD8⁺ T_{con} cells in response to 2t2 or IL2 treatment. FIG. 191A shows pSTAT5 responses in CD4⁺CD25^{hi}T_{reg} cells. Figure C191B shows pSTAT5 responses in CD4⁺CD25⁻T_{con} cells. FIG. 191C shows pSTAT5 responses in CD8⁺ T_{con} cells.

[0338] FIGS. 192A-192E is a set of imaging showing that treatment with an IL-2 based molecule (2t2) can induce formation of hair follicles following depilation in mouse model. FIG. 192A is an image from a control mouse—only depilation done after hair was shaved, FIG. 192B is an image from a mouse where depilation was followed by low dose IL-2 (1 mg/kg) administration, and FIGS. 192C-192E show images from mice where depilation was followed by 2t2 at 0.3 mg/kg, (FIG. 192C), 1 mg/kg (FIG. 192D), and (FIG. 192E) 3 mg/kg. Black arrows indicate anagen-phase hair follicles that will later extend into dermis and facilitate hair growth.

[0339] FIG. 193 shows the total number of anagen phase hair follicles counted per 10 fields for each treatment group.

[0340] FIG. 194 is a graph showing the percentage different in DNA demethylation in NK cells (relative to unexposed NK cells) from two different donors following expansion with 7t15-21s+anti-tissue factor (TF)-antibody (IgG1) (50 nM).

### DETAILED DESCRIPTION

[0341] Provided herein are methods of treating an aging-related disease or condition in a subject in need thereof that include administering to a subject identified as having an aging-related disease or condition a therapeutically effective amount of one or more natural killer (NK) cell activating agent(s) and/or a therapeutically effective number of activated NK cells. Also provided herein are methods of killing or reducing the number of senescent cells in a subject in need thereof that include administering to the subject a therapeutically effective amount of one or more NK cell activating agent(s) and/or a therapeutically effective number of activated NK cells. Also provided herein are methods of improving the texture and/or appearance of skin and/or hair in a subject in need thereof over a period of time that include administering to the subject a therapeutically effective amount of one or more natural killer (NK) cell activating agent(s) and/or a therapeutically effective number of activated NK cells. Also provided herein are methods of assisting in the treatment of obesity in a subject in need thereof over a period of time that include administering to the subject a therapeutically effective amount of one or more natural killer (NK) cell activating agent(s) and/or a therapeutically effective number of activated NK cells.

### Activated NK Cells

[0342] Some embodiments of any of the methods described herein can include administering to a subject (e.g., any of the exemplary subjects described herein) a therapeutically effective number of activated NK cells (e.g., human activated NK cells). An activated NK cell is an NK cell (e.g., a human NK cell) that has increased expression levels of two or more (e.g., three, four, five, or six) of CD25, CD69, MTOR-C1, SREBP1, IFN-γ, and a granzyme (e.g., granzyme B), e.g., as compared to a resting NK cell (e.g., a human resting NK cell). For example, an activated NK cell can have at least a 10% increase (e.g., at least a 15% increase, at least a 20% increase, at least a 25% increase, at least a 30% increase, at least a 35% increase, at least a 40% increase, at least a 45% increase, at least a 50% increase, at least a 55% increase, at least a 60% increase, at least a 65% increase, at least a 70% increase, at least a 75% increase, at least a 80% increase, at least a 85% increase, at least a 90% increase, at least a 95% increase, at least a 100% increase, at least a 120% increase, at least a 140% increase, at least a 160% increase, at least a 180% increase, at least a 200% increase, at least a 220% increase, at least a 240% increase, at least a 260% increase, at least a 280% increase, or at least a 300% increase) in the expression levels of two of more (e.g., three, four, five, or six) of CD25, CD69, MTOR-C1, SREBP1, IFN-γ, and a granzyme (e.g., granzyme B), e.g., as compared to a resting NK cell (e.g., a human activated NK cell).

[0343] In some embodiments, an activated NK cell can optionally further can have at least a 10% increase (e.g., at least a 15% increase, at least a 20% increase, at least a 25% increase, at least a 30% increase, at least a 35% increase, at least a 40% increase, at least a 45% increase, at least a 50% increase, at least a 55% increase, at least a 60% increase, at least a 65% increase, at least a 70% increase, at least a 75% increase, at least a 80% increase, at least a 85% increase, at least a 90% increase, at least a 95% increase, at least a 100% increase, at least a 120% increase, at least a 140% increase, at least a 160% increase, at least a 180% increase, at least a 200% increase, at least a 220% increase, at least a 240% increase, at least a 260% increase, at least a 280% increase, or at least a 300% increase) in the expression levels of two of more (e.g., 3, 4, 5, 6, 7, 8, 9, 10, 11, 12, 13, 14, 15, 16, 17, 18, 19, 20, 21, 22, 23, 24, 25, 26, 27, 28, or 29) of CD25, CD59, CD352, NKp80, DNAM-1, 2B4, NKp30, NKp44, NKp46, NKG2D, CD16, KIR2DS1, KIR2Ds2/3, KIR2DL4, KIR2DS4, KIR2DS5, KIR3DS1, NKG2C, CCR7, CXCR3, L-Selectin, CXCR1, CXCR2, CX3CR1, ChemR23, CXCR4, CCR5, S1P5, c-Kit, mTORC1, e.g., as compared to a resting NK cell (e.g., a human activated NK cell).

[0344] For example, an activated NK cell (e.g., a human activated NK cell) can have about a 10% increase to about a 500% increase, about a 10% increase to about a 450% increase, about a 10% increase to about a 400% increase, about a 10% increase to about a 350% increase, about a 10% increase to about a 300% increase, about a 10% increase to about a 280% increase, about a 10% increase to about a 260% increase, about a 10% increase to about a 240% increase, about a 10% increase to about a 220% increase, about a 10% increase to about a 200% increase, about a 10% increase to about a 180% increase, about a 10% increase to about a 160% increase, about a 10% increase to about a 140% increase, about a 10% increase to about a 120% increase, about a 10% increase to about a 100% increase, about a 10% increase to about a 80% increase, about a 10% increase to about a 60% increase, about a 10% increase to about a 40% increase, about a 10% increase to about a 20% increase, a 20% increase to about a 500% increase, about a 20% increase to about a 450% increase, about a 20% increase to about a 400% increase, about a 20% increase to about a 350% increase, about a 20% increase to about a 300% increase, about a 20% increase to about a 280% increase, about a 20% increase to about a 260% increase, about a 20% increase to about a 240% increase, about a 20% increase to about a 220% increase, about a 20% increase to about a 200% increase, about a 20% increase to about a 180% increase, about a 20% increase to about a 160% increase, about a 20% increase to about a 140% increase, about a 20% increase to about a 120% increase, about a 20% increase to about a 100% increase, about a 20% increase to about a 80% increase, about a 20% increase to about a 60% increase, about a 20% increase to about a 40% increase, a 40% increase to about a 500% increase, about a 40% increase to about a 450% increase, about a 40% increase to about a 400% increase, about a 40% increase to about a 350% increase, about a 40% increase to about a 300% increase, about a 40% increase to about a 280% increase, about a 40% increase to about a 260% increase, about a 40% increase to about a 240% increase, about a 40% increase to about a 220% increase, about a 40% increase to about a 200% increase, about a 40% increase to about a 180% increase, about a 40% increase to about a 160% increase, about a 40% increase to about a 140% increase, about a 40% increase to about a 120% increase, about a 40% increase to about a 100% increase, about a 40% increase to about a 80% increase, about a 40% increase to about a 60% increase, a 60% increase to about a 500% increase, about a 60% increase to about a 450% increase, about a 60% increase to about a 400% increase, about a 60% increase to about a 350% increase, about a 60% increase to about a 300% increase, about a 60% increase to about a 280% increase, about a 60% increase to about a 260% increase, about a 60% increase to about a 240% increase, about a 60% increase to about a 220% increase, about a 60% increase to about a 200% increase, about a 60% increase to about a 180% increase, about a 60% increase to about a 160% increase, about a 60% increase to about a 140% increase, about a 60% increase to about a 120% increase, about a 60% increase to about a 100% increase, about a 60% increase to about a 80% increase, a 80% increase to about a 500% increase, about a 80% increase to about a 450% increase, about a 80% increase to about a 400% increase, about a 80% increase to about a 350% increase, about a 80% increase to about a 300% increase, about a 80% increase to about a 280% increase, about a 80% increase to about a 260% increase, about a 80% increase to about a 240% increase, about a 80% increase to about a 220% increase, about a 80% increase to about a 200% increase, about a 80% increase to about a 180% increase, about a 80% increase to about a 160% increase, about a 80% increase to about a 140% increase, about a 80% increase to about a 120% increase, about a 80% increase to about a 100% increase, a 100% increase to about a 500% increase, about a 100% increase to about a 450% increase, about a 100% increase to about a 400% increase, about a 100% increase to about a 350% increase, about a 100% increase to about a 300% increase, about a 100% increase to about a 280% increase, about a 100% increase to about a 260% increase, about a 100% increase to about a 240% increase, about a 100% increase to about a 220% increase, about a 100% increase to about a 200% increase, about a 100% increase to about a 180% increase, about a 100% increase to about a 160% increase, about a 100% increase to about a 140% increase, about a 100% increase to about a 120% increase, a 120% increase to about a 500% increase, about a 120% increase to about a 450% increase, about a 120% increase to about a 400% increase, about a 120% increase to about a 350% increase, about a 120% increase to about a 300% increase, about a 120% increase to about a 280% increase, about a 120% increase to about a 260% increase, about a 120% increase to about a 240% increase, about a 120% increase to about a 220% increase, about a 120% increase to about a 200% increase, about a 120% increase to about a 180% increase, about a 120% increase to about a 160% increase, about a 120% increase to about a 140% increase, a 140% increase to about a 500% increase, about a 140% increase to about a 450% increase, about a 140% increase to about a 400% increase, about a 140% increase to about a 350% increase, about a 140% increase to about a 300% increase, about a 140% increase to about a 280% increase, about a 140% increase to about a 260% increase, about a 140% increase to about a 240% increase, about a 140% increase to about a 220% increase, about a 140% increase to about a 200% increase, about a 140% increase to about a 180% increase, about a 140% increase to about a 160% increase, a 160% increase to about a 500% increase, about a 160% increase to about a 450% increase, about a 160% increase to about a 400% increase, about a 160% increase to about a 350% increase, about a 160% increase to about a 300% increase, about a 160% increase to about a 280% increase, about a 160% increase to about a 260% increase, about a 160% increase to about a 240% increase, about a 160% increase to about a 220% increase, about a 160% increase to about a 200% increase, about a 160% increase to about a 180% increase, a 180% increase to about a 500% increase, about a 180% increase to about a 450% increase, about a 180% increase to about a 400% increase, about a 180% increase to about a 350% increase, about a 180% increase to about a 300% increase, about a 180% increase to about a 280% increase, about a 180% increase to about a 260% increase, about a 180% increase to about a 240% increase, about a 180% increase to about a 220% increase, about a 180% increase to about a 200% increase, a 200% increase to about a 500% increase, about a 200% increase to about a 450% increase, about a 200% increase to about a 400% increase, about a 200% increase to about a 350% increase, about a 200% increase to about a 300% increase, about a 200% increase to about a 280% increase, about a 200% increase to about a 260% increase, about a 200% increase to about a 240% increase, about a 200% increase to about a 220% increase, a 220% increase to about a 500% increase, about a 220% increase to about a 450% increase, about a 220% increase to about a 400% increase, about a 220% increase to about a 350% increase, about a 220% increase to about a 300% increase, about a 220% increase to about a 280% increase, about a 220% increase to about a 260% increase, about a 220% increase to about a 240% increase, a 240% increase to about a 500% increase, about a 240% increase to about a 450% increase, about a 240% increase to about a 400% increase, about a 240% increase to about a 350% increase, about a 240% increase to about a 300% increase, about a 240% increase to about a 280% increase, about a 240% increase to about a 260% increase, a 260% increase to about a 500% increase, about a 260% increase to about a 450% increase, about a 260% increase to about a 400% increase, about a 260% increase to about a 350% increase, about a 260% increase to about a 300% increase, about a 260% increase to about a 280% increase, a 280% increase to about a 500% increase, about a 280% increase to about a 450% increase, about a 280% increase to about a 400% increase, about a 280% increase to about a 350% increase, about a 280% increase to about a 300% increase, a 300% increase to about a 500% increase, about a 300% increase to about a 450% increase, about a 300% increase to about a 400% increase, about a 300% increase to about a 350% increase, a 350% increase to about a 500% increase, about a 350% increase to about a 450% increase, about a 350% increase to about a 400% increase, a 400% increase to about a 500% increase, about a 400% increase to about a 450% increase, or a 400% increase to about a 500% increase, in the expression levels of two of more (e.g., three, four, five, or six) of CD25, CD69, mTORC1, SREBP1, IFN-γ, and a granzyme (e.g., granzyme B), e.g., as compared to a resting NK cell (e.g., a human resting NK cell).

[0345] In some embodiments, an activated NK cell can further have about a 10% increase to about a 500% increase (e.g., or any of the subranges of this range described herein) in the expression levels of two of more (e.g., 3, 4, 5, 6, 7, 8, 9, 10, 11, 12, 13, 14, 15, 16, 17, 18, 19, 20, 21, 22, 23, 24, 25, 26, 27, 28, or 29) of CD25, CD59, CD352, NKp80, DNAM-1, 2B4, NKp30, NKp44, NKp46, NKG2D, CD16, KIR2DS1, KIR2Ds2/3, KIR2DL4, KIR2DS4, KIR2DS5, KIR3DS1, NKG2C, CCR7, CXCR3, L-Selectin, CXCR1, CXCR2, CX3CR1, ChemR23, CXCR4, CCR5, S1P5, c-Kit, mTORC1, e.g., as compared to a resting NK cell (e.g., a human activated NK cell).

[0346] Non-limiting examples of assays that can be used to determining the expression level of CD25, CD69, CD59, CD352, NKp80, DNAM-1, 2B4, NKp30, NKp44, NKp46, NKG2D, CD16, KIR2DS1, KIR2Ds2/3, KIR2DL4, KIR2DS4, KIR2DS5, KIR3DS1, NKG2C, CCR7, CXCR3, L-Selectin, CXCR1, CXCR2, CX3CR1, ChemR23, CXCR4, CCR5, S1P5, c-Kit, mTORC1, MYC, SREBP1, IFN-γ, and a granzyme (e.g., granzyme B) include, e.g., immunoblotting, fluorescence-assisted cell sorting, enzyme-linked immunosorbent assays, and RT-PCR.

[0347] Non-limiting examples of commercial ELISA assays that can be used to determine the expression level of CD25 are available from Diaclone, Covalab Biotechnology, and Caltag Medsystems. The protein and cDNA sequences for mature human CD25 are shown below.

Mature Human CD25 Protein
(SEQ ID NO: 1)
elcdddppe iphatfkama ykegtmlnce ckrgfrriks
gslymlctgn sshsswdnqc qctssatrnt tkqvtpqpee
qkerkttemq spmqpvdqas lpghcreppp weneateriy
hfvvgqmvyy qcvqgyralh rgpaesvckm thgktrwtqp
qlictgemet sqfpgeekpq aspegrpese tsclvtttdf
qiqtemaatm etsiftteyq vavagcvfll isvlllsglt
wqrrqrksrr ti
Human CD25 cDNA
(SEQ ID NO: 2)
gagctctg tgacgatgac ccgccagaga tcccacacgc
cacattcaaa gccatggcct acaaggaagg aaccatgttg
aactgtgaat gcaagagagg tttccgcaga ataaaaagcg
ggtcactcta tatgctctgt acaggaaact ctagccactc
gtcctgggac aaccaatgtc aatgcacaag ctctgccact
cggaacacaa cgaaacaagt gacacctcaa cctgaagaac
agaaagaaag gaaaaccaca gaaatgcaaa gtccaatgca
gccagtggac caagcgagcc ttccaggtca ctgcagggaa
cctccaccat gggaaaatga agccacagag agaatttatc
atttcgtggt ggggcagatg gtttattatc agtgcgtcca
gggatacagg gctctacaca gaggtcctgc tgagagcgtc
tgcaaaatga cccacgggaa gacaaggtgg acccagcccc
agctcatatg cacaggtgaa atggagacca gtcagtttcc
aggtgaagag aagcctcagg caagccccga aggccgtcct
gagagtgaga cttcctgcct cgtcacaaca acagattttc
aaatacagac agaaatggct gcaaccatgg agacgtccat
atttacaaca gagtaccagg tagcagtggc cggctgtgtt
ttcctgctga tcagcgtcct cctcctgagt gggctcacct
ggcagcggag acagaggaag agtagaagaa caatc

[0348] Non-limiting examples of commercial ELISA assays that can be used to determine the expression level of CD69 are available from RayBiotech, Novus Biologicals, and Aviscera Bioscience. The protein and cDNA sequences for mature human CD69 are shown below.

Mature Human CD69 Protein
(SEQ ID NO: 3)
mssencfvae nsslhpesgq endatsphfs trhegsfqvp
vlcavmnvvf itiliialia lsvgqyncpg qytfsmpsds
hvsscsedwv gyqrkcyfis tvkrswtsaq nacsehgatl
avidsekdmn flkryagree hwvglkkepg hpwkwsngke
fnnwfnvtgs dkcvflknte vssmeceknl ywicnkpyk
Human CD69 cDNA
(SEQ ID NO: 4)
atgagctctg aaaattgttt cgtagcagag aacagctctt
tgcatccgga gagtggacaa gaaaatgatg ccaccagtcc
ccatttctca acacgtcatg aagggtcctt ccaagttcct
gtcctgtgtg ctgtaatgaa tgtggtcttc atcaccattt
taatcatagc tctcattgcc ttatcagtgg gccaatacaa
ttgtccaggc caatacacat tctcaatgcc atcagacagc
catgtttctt catgctctga ggactgggtt ggctaccaga
ggaaatgcta ctttatttct actgtgaaga ggagctggac
ttcagcccaa aatgcttgtt ctgaacatgg tgctactctt
gctgtcattg attctgaaaa ggacatgaac tttctaaaac
gatacgcagg tagagaggaa cactgggttg gactgaaaaa
ggaacctggt cacccatgga agtggtcaaa tggcaaagaa
tttaacaact ggttcaacgt tacagggtct gacaagtgtg
tttttctgaa aaacacagag gtcagcagca tggaatgtga
gaagaattta tactggatat gtaacaaacc ttacaaataa

The protein and cDNA sequences for mature human CD59 are shown below.

Mature Human CD59 Protein
(SEQ ID NO: 5)
lqcyncpnptadckt avncssdfda clitkaglqv ynkcwkfehc
nfndvttrlr eneltyycck kdlcnfneql en
Human CD59 cDNA
(SEQ ID NO: 6)
atgggaatcc aaggagggtc tgtcctgttc gggctgctgc
tcgtcctggc tgtcttctgc cattcaggtc atagcctgca
gtgctacaac tgtcctaacc caactgctga ctgcaaaaca
gccgtcaatt gttcatctga ttttgatgcg tgtctcatta
ccaaagctgg gttacaagtg tataacaagt gttggaagtt
tgagcattgc aatttcaacg acgtcacaac ccgcttgagg
gaaaatgagc taacgtacta ctgctgcaag aaggacctgt
gtaactttaa cgaacagctt gaaaatggtg ggacatcctt
atcagagaaa acagttcttc tgctggtgac tccatttctg
gcagcagcct ggagccttca tccctaa

The protein and cDNA sequences for mature human CD352 are shown below.

Mature Human CD352 Protein
(SEQ ID NO: 7)
qssltplmv ngilgesvtl plefpagekv nfitwlfnet
slafivphet kspeihvtnp kqgkrinftq syslqlsnlk
medtgsyraq istktsakls sytlrilrql rniqvtnhsq
lfqnmtcelh ltcsvedadd nvsfrwealg ntlssqpnlt
vswdprisse qdytciaena vsnlsfsysa qklcedvkiq
ytdtkmilfm vsgicivfgf iillllvlrk rrdslslstq
rtqgpaesar nleyvsyspt nntvyasvth snreteiwtp
rendtitiys tinhskeskp tfsrataldn vv
Human CD352 cDNA
(SEQ ID NO: 8)
atgttgtggc tgttccaatc gctcctgttt gtcttctgct
ttggcccagg gaatgtagtt tcacaaagca gcttaacccc
attgatggtg aacgggattc tgggggagtc agtaactctt
cccctggagt ttcctgcagg agagaaggtc aacttcatca
cttggctttt caatgaaaca tctcttgcct tcatagtacc
ccatgaaacc aaaagtccag aaatccacgt gactaatccg
aaacagggaa agcgactgaa cttcacccag tcctactccc
tgcaactcag caacctgaag atggaagaca caggctctta
cagagcccag atatccacaa agacctctgc aaagctgtcc
agttacactc tgaggatatt aagacaactg aggaacatac
aagttaccaa tcacagtcag ctatttcaga atatgacctg
tgagctccat ctgacttgct ctgtggagga tgcagatgac
aatgtctcat tcagatggga ggccttggga aacacacttt
caagtcagcc aaacctcact gtctcctggg accccaggat
ttccagtgaa caggactaca cctgcatagc agagaatgct
gtcagtaatt tatccttctc tgtctctgcc cagaagcttt
gcgaagatgt taaaattcaa tatacagata ccaaaatgat
tctgtttatg gtttctggga tatgcatagt cttcggtttc
atcatactgc tgttacttgt tttgaggaaa agaagagatt
ccctatcttt gtctactcag cgaacacagg gccccgagtc
cgcaaggaac ctagagtatg tttcagtgtc tccaacgaac
aacactgtgt atgcttcagt cactcattca aacagggaaa
cagaaatctg gacacctaga gaaaatgata ctatcacaat
ttactccaca attaatcatt ccaaagagag taaacccact
ttttccaggg caactgccct tgacaatgtc gtgtaa

The protein and cDNA sequences for mature human NKp80 are shown below.

Mature Human NKp80 Protein
(SEQ ID NO: 9)
mqdeerymtl nvqskkrssa qtsqltfkdy svtlhwykil
lgisgtvngi ltltlislil lvsqgvllkc qkgscsnatq
yedtgdlkvn ngtrrnisnk dlcasrsadq tvlcqsewlk
yqgkcywfsn emkswsdsyv yclerkshll iihdqlemaf
iqknlrqlny vwiglnftsl kmtwtwvdgs pidskiffik
gpakenscaa ikeskifset cssvfkwicq y
Human NKp80 cDNA
(SEQ ID NO: 10)
atgcaagatg aagaaagata catgacattg aatgtacagt
caaagaaaag gagttctgcc caaacatctc aacttacatt
taaagattat tcagtgacgt tgcactggta taaaatctta
ctgggaatat ctggaaccgt gaatggtatt ctcactttga
ctttgatctc cttgatcctg ttggtactat gccaatcaga
atggctcaaa taccaaggga agtgttattg gttctctaat
gagatgaaaa gctggagtga cagttatgtg tattgtttgg
aaagaaaatc tcatctacta atcatacatg accaacttga
aatggctttt atacagaaaa acctaagaca attaaactac
gtatggattg ggcttaactt tacctccttg aaaatgacat
ggacttgggt ggatggttct ccaatagatt caaagatatt
cttcataaag ggaccagcta aagaaaacag ctgtgctgcc
attaaggaaa gcaaaatttt ctctgaaacc tgcagcagtg
ttttcaaatg gatttgtcag tattag

The protein and cDNA sequences for mature human DNAM-1 are shown below.

Mature Human DNAM-1 Protein
(SEQ ID NO: 11)
ee vlwhtsvpfa enmslecvyp smgiltqvew fkigtqqdsi
aifspthgmv irkpyaervy flnstmasnn mtlffrnase
ddvgyyscsl ytypqgtwqk viqvvqsdsf eaavpsnshi
vsepgknvtl tcqpqmtwpv qavrwekiqp rqidlltycn
lvhgrnftsk fprqivsncs hgrwsvivip dvtvsdsgly
rcylqasage netfvmrltv aegktdnqyt lfvaggtvll
llfvisitti iviflnrrrr rerrdlftes wdtqkapnny
rspistsgpt nqsmddtred iyvnyptfsr rpktrv
Human DNAM-1 cDNA
(SEQ ID NO: 12)
atggattatc ctactttact tttggctctt cttcatgtat
acagagctct atgtgaagag gtgctttggc atacatcagt
tccctttgcc gagaacatgt ctctagaatg tgtgtatcca
tcaatgggca tcttaacaca ggtggagtgg ttcaagatcg
ggacccagca ggattccata gccattttca gccctactca
tggcatggtc ataaggaagc cctatgctga gagggtttac
tttttgaatt caacgatggc ttccaataac atgactcttt
tctttcggaa tgcctctgaa gatgatgttg gctactattc
ctgctctctt tacacttacc cacagggaac ttggcagaag
gtgatacagg tggttcagtc agatagtttt gaggcagctg
tgccatcaaa tagccacatt gtttcggaac ctggaaagaa
tgtcacactc acttgtcagc ctcagatgac gtggcctgtg
caggcagtga ggtgggaaaa gatccagccc cgtcagatcg
acctcttaac ttactgcaac ttggtccatg gcagaaattt
cacctccaag ttcccaagac aaatagtgag caactgcagc
cacggaaggt ggagcgtcat cgtcatcccc gatgtcacag
tctcagactc ggggctttac cgctgctact tgcaggccag
cgcaggagaa aacgaaacct tcgtgatgag attgactgta
gccgagggta aaaccgataa ccaatatacc ctctttgtgg
ctggagggac agttttattg ttgttgtttg ttatctcaat
taccaccatc attgtcattt tccttaacag aaggagaagg
agagagagaa gagatctatt tacagagtcc tgggatacac
agaaggcacc caataactat agaagtccca tctctaccag
tcaacctacc aatcaatcca tggatgatac aagagaggat
atttatgtca actatccaac cttctctcgc agaccaaaga
ctagagttta a

The protein and cDNA sequences for mature human 2B4 are shown below.

Mature Human 2B4 Protein
(SEQ ID NO: 13)
gk gcqgsadhvv sisgvplqlq pnsiqtkvds iawkkllpsq
ngfhhilkwe ngslpsntsn drfsfivknl sllikaaqqq
dsglyclevt sisgkvqtat fqvfvfdkve kprlqgqgki
ldrgrcqval sclvsrdgnv syawyrgskl iqtagnltyl
deevdingth tytcnvsnpv sweshtlnlt qdcqnahqef
rfwpflviiv ilsalflgtl acfcvwrrkr kekqsetspk
efltiyedvk dlktrrnheq eqtfpgggst iysmiqsqss
aptsqepayt lysliqpsrk sgsrkrnhsp sfnstiyevi
gksqpkaqnp arlsrkelen fdvys
Human 2B4 cDNA
(SEQ ID NO: 14)
atgctggggc aagtggtcac cctcatactc ctcctgctcc
tcaaggtgta tcagggcaaa ggatgccagg gatcagctga
ccatgtggtt agcatctcgg gagtgcctct tcagttacaa
ccaaacagca tacagacgaa ggttgacagc attgcatgga
agaagttgct gccctcacaa aatggatttc atcacatatt
gaagtgggag aatggctctt tgccttccaa tacttccaat
gatagattca gttttatagt caagaacttg agtcttctca
tcaaggcagc tcagcagcag gacagtggcc tctactgcct
ggaggtcacc agtatatctg gaaaagttca gacagccacg
ttccaggttt ttgtatttga taaagttgag aaaccccgcc
tacaggggca ggggaagatc ctggacagag ggagatgcca
agtggctctg tcttgcttgg tctccaggga tggcaatgtg
tcctatgctt ggtacagagg gagcaagctg atccagacag
cagggaacct cacctacctg gacgaggagg ttgacattaa
tggcactcac acatatacct gcaatgtcag caatcctgtt
agctgggaaa gccacaccct gaatctcact caggactgtc
agaatgccca tcaggaattc agattttggc cgtttttggt
gatcatcgtg attctaagcg cactgttcct tggcaccctt
gcctgcttct gtgtgtggag gagaaagagg aaggagaagc
agtcagagac cagtcccaag gaatttttga caatttacga
agatgtcaag gatctgaaaa ccaggagaaa tcacgagcag
gagcagactt ttcctggagg ggggagcacc atctactcta
tgatccagtc ccagtcttct gctcccacgt cacaagaacc
tgcatataca ttatattcat taattcagcc ttccaggaag
tctggatcca ggaagaggaa ccacagccct tccttcaata
gcactatcta tgaagtgatt ggaaagagtc aacctaaagc
ccagaaccct gctcgattga gccgcaaaga gctggagaac
tttgatgttt attcctag

The protein and cDNA sequences for mature human NKp30 are shown below.

Mature Human NKp30 Protein
(SEQ ID NO: 15)
lw vsqppeirtl egssaflpcs fnasqgrlai gsvtwfrdev
vpgkevrngt pefrgrlapl assrflhdhq aelhirdvrg
hdasiyvcrv evlglgvgtg ngtrlvveke hpqlgagtvl
llragfyavs flsvavgstv yyqgkcltwk gprrqlpavv
paplpppcgs sahllppvpg g
Human NKp30 cDNA
(SEQ ID NO: 16)
atggcctgga tgctgttgct catcttgatc atggtccatc
caggatcctg tgctctctgg gtgtcccagc cccctgagat
tcgtaccctg gaaggatcct ctgccttcct gccctgctcc
ttcaatgcca gccaagggag actggccatt ggctccgtca
cgtggttccg agatgaggtg gttccaggga aggaggtgag
gaatggaacc ccagagttca ggggccgcct ggccccactt
gcttcttccc gtttcctcca tgaccaccag gctgagctgc
acatccggga cgtgcgaggc catgacgcca gcatctacgt
gtgcagagtg gaggtgctgg gccttggtgt cgggacaggg
aatgggactc ggctggtggt ggagaaagaa catcctcagc
taggggctgg tacagtcctc ctccttcggg ctggattcta
tgctgtcagc tttctctctg tggccgtggg cagcaccgtc
tattaccagg gcaaatgcca ctgtcacatg ggaacacact
gccactcctc agatgggccc cgaggagtga ttccagagcc
cagatgtccc tag

The protein and cDNA sequences for mature human NKp44 are shown below.

Mature Human NKp44 Protein
(SEQ ID NO: 17)
qskaqvlqs vagqtltvrc qypptgslye kkgwckeasa
lvcirlvtss kprtmawtsr ftiwddpdag fftvtmtdlr
eedsghywcr iyrpsdnsvs ksvrfylvvs pasastqtsw
tprdlvssqt qtqscvppta garqapesps tipvpsqpqn
stlrpgpaap ialvpvfcgl lvakslvlsa llvwwgdiww
ktmmelrsld tqkatchlqg vtdlpwtsvs spvereilyh
tvartkisdd ddehtl
Human NKp44 cDNA
(SEQ ID NO: 18)
atggcctggc gagccctaca cccactgcta ctgctgctgc
tgctgttccc aggctctcag gcacaatcca aggctcaggt
acttcaaagt gtggcagggc agacgctaac cgtgagatgc
cagtacccgc ccacgggcag tctctacgag aagaaaggct
ggtgtaagga ggcttcagca cttgtgtgca tcaggttagt
caccagctcc aagcccagga cgatggcttg gacctctcga
ttcacaatct gggacgaccc tgatgctggc ttcttcactg
tcaccatgac tgatctgaga gaggaagact caggacatta
ctggtgtaga atctaccgcc cttctgacaa ctctgtctct
aagtccgtca gattctatct ggtggtatct ccagcctctg
cctccacaca gacctcctgg actccccgcg acctggtctc
ttcacagacc cagacccaga gctgtgtgcc tcccactgca
ggagccagac aagcccctga gtctccatct accatccctg
tcccttcaca gccacagaac tccacgctcc gccctggccc
tgcagccccc attgccctgg tgcctgtgtt ctgtggactc
ctcgtagcca agagcctggt gctgtcagcc ctgctcgtct
ggtgggtttt aaggaatcgg cacatgcagc atcaagggag
gtctctgctg cacccagctc agcccaggcc ccaggcccat
agacacttcc cactgagcca cagggcacca ggggggacat
atggtggaaa accatga

The protein and cDNA sequences for mature human NKp46 are shown below.

Mature Human NKp46 Protein
(SEQ ID NO: 19)
qqqtlpkpf iwaephfmvp kekqvticcq gnygaveyql
hfegslfavd rpkpperink vqfyipdmns rmagqysciy
rvgelwseps nlldlvvtem ydtptlsvhp gpevisgekv
tfycrldtat smflllkegr sshvqrgygk vqaefplgpv
ttahrgtyrc fgsynnhaws fpsepvkllv tgdientsla
pedptfpadt wgtyllttet glqkdhalwd htagnllrmg
laflvlvalv wflvedwlsr krtrerasra stwegrrrln
tqtl
Human NKp46 cDNA
(SEQ ID NO: 20)
atggcctggc gagccctaca cccactgcta ctgctgctgc
tgctgttccc aggctctcag gcacaatcca aggctcaggt
acttcaaagt gtggcagggc agacgctaac cgtgagatgc
cagtacccgc ccacgggcag tctctacgag aagaaaggct
ggtgtaagga ggcttcagca cttgtgtgca tcaggttagt
caccagctcc aagcccagga cgatggcttg gacctctcga
ttcacaatct gggacgaccc tgatgctggc ttcttcactg
tcaccatgac tgatctgaga gaggaagact caggacatta
ctggtgtaga atctaccgcc cttctgacaa ctctgtctct
aagtccgtca gattctatct ggtggtatct ccagcctctg
cctccacaca gacctcctgg actccccgcg acctggtctc
ttcacagacc cagacccaga gctgtgtgcc tcccactgca
ggagccagac aagcccctga gtctccatct accatccctg
tcccttcaca gccacagaac tccacgctcc gccctggccc
tgcagccccc attgccctgg tgcctgtgtt ctgtggactc
ctcgtagcca agagcctggt gctgtcagcc ctgctcgtct
ggtgggtttt aaggaatcgg cacatgcagc atcaagggag
gtctctgctg cacccagctc agcccaggcc ccaggcccat
agacacttcc cactgagcca cagggcacca ggggggacat
atggtggaaa accatga

The protein and cDNA sequences for mature human NKG2D are shown below.

Mature Human NKG2D Protein
(SEQ ID NO: 21)
mgwirgrrsr hswemsefhn ynldlkksdf strwqkqrcp
vvkskcrena spfffccfia vamgirfiim vaiwsavfln
slfnqevqip ltesycgpcp knwicyknnc yqffdesknw
yesqascmsq nasllkvysk edqdllklvk syhwmglvhi
ptngswqwed gsilspnllt iiemqkgdca lyassfkgyi
encstpntyi cmqrtv
Human NKG2D cDNA
(SEQ ID NO: 22)
atggggtgga ttcgtggtcg gaggtctcga cacagctggg
agatgagtga atttcataat tataacttgg atctgaagaa
gagtgatttt tcaacacgat ggcaaaagca aagatgtcca
gtagtcaaaa gcaaatgtag agaaaatgca tctccatttt
ttttctgctg cttcatcgct gtagccatgg gaatccgttt
cattattatg gtaacaatat ggagtgctgt attcctaaac
tcattattca accaagaagt tcaaattccc ttgaccgaaa
gttactgtgg cccatgtcct aaaaactgga tatgttacaa
aaataactgc taccaatttt ttgatgagag taaaaactgg
tatgagagcc aggcttcttg tatgtctcaa aatgccagcc
ttctgaaagt atacagcaaa gaggaccagg atttacttaa
actggtgaag tcatatcatt ggatgggact agtacacatt
ccaacaaatg gatcttggca gtgggaagat ggctccattc
tctcacccaa cctactaaca ataattgaaa tgcagaaggg
agactgtgca ctctatgcct cgagctttaa aggctatata
gaaaactgtt caactccaaa tacgtacatc tgcatgcaaa
ggactgtgta a

The protein and cDNA sequences for mature human CD16a are shown below.

Mature Human CD16a Protein
(SEQ ID NO: 23)
maegtlwqil cvssdaqpqt fegvkgadpp tlppgsflpg
pvlwwgslar lqteksdevs rkgnwwvtem gggagerlft
ssclvglvpl glrislvtcp lqcgimwqll lptallllvs
agmrtedlpk avvflepqwy rvlekdsvtl kcqgaysped
nstqwfhnes lissqassyf idaatvddsg eyrcqtnlst
lsdpvglevh igwlllqapr wvfkeedpih lrchswknta
lhkvtylqng kgrkyfhhns dfyipkatlk dsgsyfcrgl
fgsknvsset vnititqgla vstissffpp gyqvsfclvm
vllfavdtgl yfsvktnirs strdwkdhkf kwrkdpqdk
Human CD16a cDNA
(SEQ ID NO: 24)
atggctgagggcacactctggcagattctgtgtgtgtcctcagatgctca
gccacagacctttgagggagtaaagggggcagacccacccaccttgcctc
caggctctttccttcctggtcctgttctatggtggggctcccttgccaga
cttcagactgagaagtcagatgaagtttcaagaaaaggaaattggtgggt
gacagagatgggtggaggggctggggaaaggctgtttacttcctcctgtc
tagtcggtttggtccctttagggctccggatatctttggtgacttgtcca
ctccagtgtggcatcatgtggcagctgctcctcccaactgctctgctact
tctagtttcagctggcatgcggactgaagatctcccaaaggctgtggtgt
tcctggagcctcaatggtacagggtgctcgagaaggacagtgtgactctg
aagtgccagggagcctactcccctgaggacaattccacacagtggtttca
caatgagagcctcatctcaagccaggcctcgagctacttcattgacgctg
ccacagtcgacgacagtggagagtacaggtgccagacaaacctctccacc
ctcagtgacccggtgcagctagaagtccatatcggctggctgttgctcca
ggcccctcggtgggtgttcaaggaggaagaccctattcacctgaggtgtc
acagctggaagaacactgctctgcataaggtcacatatttacagaatggc
aaaggcaggaagtattttcatcataattctgacttctacattccaaaagc
cacactcaaagacagcggctcctacttctgcagggggctttttgggagta
aaaatgtgtcttcagagactgtgaacatcaccatcactcaaggtttggca
gtgtcaaccatctcatcattctttccacctgggtaccaagtctctttctg
cttggtgatggtactcctttttgcagtggacacaggactatatttctctg
tgaagacaaacattcgaagctcaacaagagactggaaggaccataaattt
aaatggagaaaggaccctcaagacaaatga

The protein and cDNA sequences for mature human CD16b are shown below.

Mature Human CD16b Protein
(SEQ ID NO: 25)
mwqlllptal lllvsagmrt edlpkavvfl epqwysvlek
dsvtlkcqga yspednstqw fhneslissq assyfidaat
vndsgeyrcq tnlstlsdpv qlevhigwll lqaprwvfke
edpihlrchs wkntalhkvt ylqngkdrky fhhnsdfhip
katlkdsgsy fcrglvgskn vssetvniti tqglaystis
sfsppgyqvs fclvmvllfa vdtglyfsvk tni
Human CD16b cDNA
(SEQ ID NO: 26)
atgtggcagctgctcctcccaactgctctgctacttctagtttcagctgg
catgcggactgaagatctcccaaaggctgtggtgttcctggagcctcaat
ggtacagcgtgcttgagaaggacagtgtgactctgaagtgccagggagcc
tactcccctgaggacaattccacacagtggtttcacaatgagaacctcat
ctcaagccaggcctcgagctacttcattgacgctgccacagtcaacgaca
gtggagagtacaggtgccagacaaacctctccaccctcagtgacccggtg
cagctagaagtccatatcggctggctgttgctccaggcccctcggtgggt
gttcaaggaggaagaccctattcacctgaggtgtcacagctggaagaaca
ctgctctgcataaggtcacatatttacagaatggcaaagacaggaagtat
tttcatcataattctgacttccacattccaaaagccacactcaaagatag
cggctcctacttctgcagggggcttgttgggagtaaaaatgtgtcttcag
agactgtgaacatcaccatcactcaaggtttggcagtgtcaaccatctca
tcattctctccacctgggtaccaagtctctttctgcttggtgatggtact
cctttttgcagtggacacaggactatatttctctgtgaagacaaacattt
ga

The protein and cDNA sequences for mature human KIR2DS1 are shown below.

Human KIR2DS1 Protein
(SEQ ID NO: 27)
[sequence omitted]
Human KIR2DS1 cDNA
(SEQ ID NO: 28)
atgtcgctcacggtcgtcagcatggcgtgtgttgggttcttcttgctgca
gggggcctggccacatgagggagtccacagaaaaccttccctcctggccc
acccaggtcgcctggtgaaatcagaagagacagtcatcctgcaatgttgg
tcagatgtcatgtttgaacacttccttctgcacagagaggggatgtttaa
cgacactttgcgcctcattggagaacaccatgatggggtctccaaggcca
acttctccatcagtcgcatgaagcaagacctggcagggacctacagatgc
tacggttctgttactcactccccctatcagttgtcagctcccagtgaccc
tctggacatcgtgatcataggtctatatgagaaaccttctctctcagccc
agccgggccccacggttctggcaggagagaatgtgaccttgtcctgcagc
tcccggagctcctatgacatgtaccatctatccagggaaggggaggccca
tgaacgtaggctccctgcagggaccaaggtcaacggaacattccaggcca
actttcctctgggccctgccacccatggagggacctacagatgcttcggc
tctttccgtgactctccatacgagtggtcaaagtcaagtgacccactgct
tgtttctgtcacaggaaacccttcaaatagttggccttcacccactgaac
caagctccgaaaccggtaaccccagacacctacatgttctgattgggacc
tcagtggtcaaaatccctttcaccatcctcctcttctttctccttcatcg
ctggtgctccgacaaaaaaaatgctgctgtaatggaccaagagcctgcag
ggaacagaacagtgaacagcgaggattctgatgaacaagaccatcaggag
gtgtcatacgcataa

The protein and cDNA sequences for mature human KIR2DS2 are shown below.

Human KIR2DS2 Protein
(SEQ ID NO: 29)
[sequence omitted]
Human KIR2DS2 cDNA
(SEQ ID NO: 30)
atgtcgctcatggtcgtcagcatggcgtgtgttgggttcttcttgctgca
gggggcctggccacatgagggagtccacagaaaaccttccctcctggccc
acccaggtcccctggtgaaatcagaagagacagtcatcctgcaatgttgg
tcagatgtcaggtttgagcacttccttctgcacagagaggggaagtataa
ggacactttgcacctcattggagagcaccatgatggggtctccaaggcca
acttctccatcggtcccatgatgcaagaccttgcagggacctacagatgc
tacggttctgttactcactccccctatcagttgtcagctcccagtgaccc
tctggacatcgtcatcacaggtctatatgagaaaccttctctctcagccc
agccgggccccacggttttggcaggagagagcgtgaccttgtcctgcagc
tcccggagctcctatgacatgtaccatctatccagggagggggaggccca
tgaacgtaggttctctgcagggcccaaggtcaacggaacattccaggccg
actttcctctgggccctgccacccacggaggaacctacagatgcttcggc
tctttccgtgactctccctatgagtggtcaaactcgagtgacccactgct
tgtttctgtcacaggaaacccttcaaatagttggccttcacccactgaac
caagctccaaaaccggtaaccccagacacctgcatgttctgattgggacc
tcagtggtcaaaatccctttcaccatcctcctcttctttctccttcatcg
ctggtgctccaacaaaaaaaatgctgctgtaatggaccaagagcctgcag
ggaacagaacagtgaacagcgaggactctgatgaacaagaccctcaggag
gtgacatacacacagttgaatcactgcgttttcacacagagaaaaatcac
tcgcccttctcagaggcccaagacacccccaacagatatcatcgtgtaca
cggaacttccaaatgctgagtccaga

The protein and cDNA sequences for mature human KIR2DS3 are shown below.

Mature Human KIR2DS3 Protein
(SEQ ID NO: 31)
mslmvismac vgffwlqgaw phegfrrkps llahpgrlvk
seetvilqcw sdvmfehfll hregtfndtl rligehidgv
skanfsigrm rqdlagtyrc ygsvphspyq fsapsdpldi
vitglyekps lsaqpgptvl agesvtlscs swssydmyhl
stegeaherr fsagpkvngt fqadfplgpa tqggtyrcfg
sfhdspyews kssdpllvsv tgnpsnswps ptepssktgn
prhlhvligt svvklpftil lffllhrwcs dkknasvmdq
gpagnrtvnr edsdeqdhqe vsya
Human KIR2DS3 cDNA
(SEQ ID NO: 32)
atgtcgctcatggtcatcagcatggcatgtgttgggttcttctggctgca
gggggcctggccacatgagggattccgcagaaaaccttccctcctggccc
acccaggtcgcctggtgaaatcagaagagacagtcatcctgcaatgttgg
tcagatgtcatgtttgagcacttccttctgcacagagaggggacgtttaa
cgacactttgcgcctcattggagagcacattgatggggtctccaaggcca
acttctccatcggtcgcatgaggcaagacctggcagggacctacagatgc
tacggttctgttcctcactccccctatcagttttcagctcccagtgaccc
tctggacatcgtgatcacaggtctatatgagaaaccttctctctcagccc
agccgggccccacggttctggcaggagagagcgtgaccttgtcctgcagc
tcctggagctcctatgacatgtaccatctatccacggagggggaggccca
tgaacgtaggttctctgcagggcccaaggtcaacggaacattccaggccg
actttcctctgggccctgccacccaaggaggaacctacagatgcttcggc
tctttccatgactctccctacgagtggtcaaagtcaagtgacccactgct
tgtttctgtcacaggaaacccttcaaatagttggccttcacccactgaac
caagctccaaaaccggtaaccccagacacctacacgttctgattgggacc
tcagtggtcaaactccctttcaccatcctcctcttctttctccttcatcg
ctggtgctccgacaaaaaaaatgcatctgtaatggaccaagggcctgcgg
ggaacagaacagtgaacagggaggattctgatgaacaggaccatcaggag
gtgtcatacgcataa

The protein and cDNA sequences for mature human KIR2DL4 are shown below.

Mature Human KIR2DL4 Protein
(SEQ ID NO: 33)
hvggqdk pfcsawpsav vpqgghatlr chcrrgfnif
tlykkdgvpv pelynrifwn sflispvtpa hagtyrcrgf
hphsptewsa psnplvimvt glyekpslta rpgptvrage
nvtlscssqs sfdiyhlsre geahelrlpa vpsingtfqa
dfplgpathg etyrcfgsfh gspyewsdps dplpvsvtgn
pssswpspte psfktgiarh lhavirysva iilftilpff
llhrwcskkk naavmnqepa ghrtvnreds degdpgevty
agldhciftg rkitgpsqrs krpstdtsvc ielpnaepra
lspahehhsq almgssrett alsqtqlass nvpaagi
Human KIR2DL4 cDNA
(SEQ ID NO: 34)
atgtccccttcacatgttgtggtcaatgtgtcaactgcacgatccgggcc
cctcaccacatcctctgcaccggtcagtcgagccgagtcactgcgtcctg
gcagcagaagctgcaccatgtccatgtcacccacggtcatcatcctggca
tgtcttgggttcttcttggaccagagtgtgtgggcacacgtgggtggtca
ggacaagcccttctgctctgcctggcccagcgctgtggtgcctcaaggag
gacacgtgactcttcggtgtcactatcgtcgtgggtttaacatcttcacg
ctgtacaagaaagatggggtccctgtccctgagctctacaacagaatatt
ctggaacagtttcctcattagccctgtgaccccagcacacgcagggacct
acagatgtcgaggttttcacccgcactcccccactgagtggtcggcaccc
agcaaccccctggtgatcatggtcacaggtctatatgagaaaccttcgct
tacagcccggccgggccccacggttcgcgcaggagagaacgtgaccttgt
cctgcagctcccagagctcctttgacatctaccatctatccagggagggg
gaagcccatgaacttaggctccctgcagtgcccagcatcaatggaacatt
ccaggccgacttccctctgggtcctgccacccacggagagacctacagat
gcttcggctctttccatggatctccctacgagtggtcagacccgagtgac
ccactgcctgtttctgtcacaggaaacccttctagtagttggccttcacc
cactgaaccaagcttcaaaactggtatcgccagacacctgcatgctgtga
ttaggtactcagtggccatcatcctctttaccatccttcccttctttctc
cttcatcgctggtgctccaaaaaaaaagatgctgctgtaatgaaccaaga
gcctgcgggacacagaacagtgaacagggaggactctgatgaacaagacc
ctcaggaggtgacatacgcacagttggatcactgcattttcacacagaga
aaaatcactggcccttctcagaggagcaagagaccctcaacagataccag
cgtgtgtatagaacttccaaatgctgagcccagagcgttgtctcctgccc
atgagcaccacagtcaggccttgatgggatcttctagggagacaacagcc
ctgtctcaaacccagcttgccagctctaatgtaccagcagctggaatctg
a

The protein and cDNA sequences for mature human KIR2DS4 are shown below.

Mature Human KIR2DS4 Protein
(SEQ ID NO: 35)
qegvhrkps flalpghlvk seetvilqcw sdvmfehfll
hregkfnntl hligehhdgv skanfsigpm mpvlagtyrc
yssvphspyq lsapsdpldm viiglyekps lsaqpgptvg
agenvslscs siypgrgrpm nvgslqcaas tehsrptflw
alpptegptd asalsvtlpt sgqtrvihcl fpsgetlgiv
glhpinqapk pvtpdtymf
Human KIR2DS4 cDNA
(SEQ ID NO: 36)
atgtcgctcatggtcatcatcatggcgtgtgttgggttcttcttgctgca
gggggcctggccacaggagggagtccacagaaaaccttccttcctggccc
tcccaggtcacctggtgaaatcagaagagacagtcatcctgcaatgttgg
tcggatgtcatgtttgagcacttccttctgcacagagaggggaagtttaa
caacactttgcacctcattggagagcaccatgatggggtttccaaggcca
acttctccattggtcccatgatgcctgtccttgcaggaacctacagatgc
tacggttctgttcctcactccccctatcagttgtcagctcccagtgaccc
tctggacatggtgatcataggtctatatgagaaaccttctctctcagccc
agccgggccccacggttcaggcaggagagaatgtgaccttgtcctgcagc
tccatctatccagggaaggggaggcccatgaacgtaggctccctgcagtg
cgcagcatcaacggaacattccaggccgactttcctctgggccctgccac
ccacggagggacctacagatgcttcggctctttccgtgacgctccctacg
agtggtcaaactcgagtgatccactgcttgtttccgtcacaggaaaccct
tcaaatagttggccttcacccactgaaccaagctccaaaaccggtaaccc
cagacacctacatgttctgattgggacctcagtggtcaaaatccctttca
ccatcctcctcttctttctccttcatcgctggtgctccgacaaaaaaaat
gctgctgtaatggaccaagagcctgcagggaacagaacagtgaacagcga
ggattctgatgaacaagaccatcaggaggtgtcatacgcataa

The protein and cDNA sequences for mature human KIR2DS5 are shown below.

Mature Human KIR2DS5
(SEQ ID NO: 37)
hegfrrkps llahpgplvk seetvilqcw sdvmfehfll
hregtfnhtl rligehidgv skgnfsigrm tqdlagtyrc
ygsvthspyq lsapsdpldi vitglyekps lsaqpgptvl
agesvtlscs srssydmyhl sregeaherr lpagtkvngt
fqadfpldpa thggtyrcfg sfrdspyews kssdpllvsv
tgntsnswps ptepssktgn prhlhvligt svvklpftil
lffllhrwcs nkknasvmdq gpagnrtvnr edsdeqdhqe
vsya
Human KIR2DS5 cDNA
(SEQ ID NO: 38)
atgtcgctcatggtcatcagcatggcgtgtgttgcgttcttcttgctgca
gggggcctggccacatgagggattccgcagaaaaccttccctcctggccc
acccaggtcccctggtgaaatcagaagagacagtcatcctgcaatgttgg
tcagatgtcatgtttgagcacttccttctgcacagagaggggacgtttaa
ccacactttgcgcctcattggagagcacattgatggggtctccaagggca
acttctccatcggtcgcatgacacaagacctggcagggacctacagatgc
tacggttctgttactcactccccctatcagttgtcagcgcccagtgaccc
tctggacatcgtgatcacaggtctatatgagaaaccttctctctcagccc
agccgggccccacggttctggcaggagagagcgtgaccttgtcctgcagc
tcccggagctcctatgacatgtaccatctatccagggaaggggaggccca
tgaacgtaggctccctgcagggcccaaggtcaacagaacattccaggccg
actttcctctggaccctgccacccacggagggacctacagatgcttcggc
tctttccgtgactctccatacgagtggtcaaagtcaagtgacccactgct
tgtttctgtcacaggaaactcttcaaatagttggccttcacccactgaac
caagctccgaaaccggtaaccccagacacctacacgttctgattgggacc
tcagtggtcaaactccctttcaccatcctcctcttctttctccttcatcg
ctggtgctccaacaaaaaaaatgcatctgtaatggaccaagggcctgcgg
ggaacagaacagtgaacagggaggattctgatgaacaggaccatcaggag
gtgtcatacgcataa

The protein and cDNA sequences for mature human KIR3DS1 are shown below.

Mature Human KIR3DS1 cDNA
(SEQ ID NO: 39)
hmggqdkpf lsawpsavvp rgghvtlrch yrhrfnnfml
ykedrihvpi fhgrifqegf nmspvttaha gnytcrgshp
hsptgwsaps npmvimvtgn hrkpsllahp gplvksgerv
ilqcwsdimf ehfflhkegi skdpsrlvgq ihdgvskanf
sigsmmrala gtyrcygsvt htpyqlsaps dpldivvtgl
yekpslsaqp gpkvqagesv tlscssrssy dmyhlsregg
aherrlpavr kvnrtfqadf plgpathggt yrcfgsfrhs
pyewsdpsdp llvsvtgnps sswpspteps sksgnlrhlh
iligtsvvki pftillffll hrwcsnkkkc ccngpracre
qk
Human KIR3DS1 cDNA
(SEQ ID NO: 40)
atgttgctcatggtcgtcagcatggcgtgtgttgggttgttcttggtcca
gagggccggtccacacatgggtggtcaggacaagcccttcctgtctgcct
ggcccagcgctgtggtgcctcgcggaggacacgtgactcttcggtgtcac
tatcgtcataggtttaacaatttcatgctatacaaagaagacagaatcca
cgttcccatcttccatggcagaatattccaggagggcttcaacatgagcc
ctgtgaccacagcacatgcagggaactacacatgtcggggttcacaccca
cactcccccactgggtggtcggcacccagcaaccccatggtgatcatggt
cacaggaaaccacagaaaaccttccctcctggcccacccaggtcccctgg
tgaaatcaggagagagagtcatcctgcaatgttggtcagatatcatgttt
gagcacttctttctgcacaaagagtggatctctaaggacccctcacgcct
cgttggacagatccatgatggggtctccaaggccaatttctccatcggtt
ccatgatgcgtgcccttgcagggacctacagatgctacggttctgttact
cacaccccctatcagttgtcagctcccagtgatcccctggacatcgtggt
cacaggtctatatgagaaaccttctctctcagcccagccgggccccaagg
ttcaggcaggagagagcgtgaccttgtcctgtagctcccggagctcctat
gacatgtaccatctatccagggaggggggagcccatgaacgtaggctccc
tgcagtgcgcaaggtcaacagaacattccaggcagatttccctctgggcc
ctgccacccacggagggacctacagatgcttcggctctttccgtcactct
ccctacgagtggtcagacccgagtgacccactgcttgtttctgtcacagg
aaacccttcaagtagttggccttcacccacagaaccaagctccaaatctg
gtaacctcagacacctgcacattctgattgggacctcagtggtcaaaatc
cctttcaccatcctcctcttctttctccttcatcgctggtgctccaacaa
aaaaaaatgctgctgtaatggaccaagagcctgcagggaacagaagtga

The protein and cDNA sequences for mature human NKG2C are shown below.

Mature Human NKG2C Protein
(SEQ ID NO: 41)
mskqrgtfse vslaqdpkrq qrkpkgnkss isgteqeifq
velnlqnpsl nhqgidkiyd cqgllpppek ltaevlgiic
ivlmatvlkt ivlipfleqn nsspntrtqk arhcghcpee
witysnscyy igkerrtwee sllactskns sllsidneee
mkflasilps swigvfrnss hhpwvtingl afkhkikdsd
naelncavlq vnrlksaqcg ssmiyhckhk l
Human NKG2C cDNA
(SEQ ID NO: 42)
atgaataaacaaagaggaaccttctcagaagtgagtctggcccaggaccc
aaagcggcagcaaaggaaacctaaaggcaataaaagctccatttcaggaa
ccgaacaggaaatattccaagtagaattaaatcttcaaaatccttccctg
aatcatcaagggattgataaaatatatgactgccaaggtttactgccacc
tccagagaagctcactgccgaggtcctaggaatcatttgcattgtcctga
tggccactgtgttaaaaacaatagttcttattcctttcctggagcagaac
aatttttccccgaatacaagaacgcagaaagcacgtcattgtggccattg
tcctgaggagtggattacatattccaacagttgttattacattggtaagg
aaagaagaacttgggaagagagtttgctggcctgtacttcgaagaactcc
agtctgctttctatagataatgaagaagaaatgaaatttctggccagcat
tttaccttcctcatggattggtgtgtttcgtaacagcagtcatcatccat
gggtgacaataaatggtttggctttcaaacataagataaaagactcagat
aatgctgaacttaactgtgcagtgctacaagtaaatcgacttaaatcagc
ccagtgtggatcttcaatgatatatcattgtaagcataagctttag

The protein and cDNA sequences for mature human CCR7 are shown below.

Mature Human CCR7 Protein
(SEQ ID NO: 43)
qdevtd dyigdnttvd ytlfeslcsk kdvrnfkawf
lpimysiicf vgllgnglvv ltyiyfkrlk tmtdtyllnl
avadilfllt lpfwaysaak swvfgvhfck lifaiykmsf
fsgmllllci sidryvaivq avsahrhrar vllisklscv
giwilatvls ipellysdlq rssseqamrc slitehveaf
itiqvaqmvi gflvpllams fcylviirtl lqarnfernk
aikviiavvv vfivfqlpyn gvvlaqtvan fnitsstcel
skqlniaydv tyslacvrcc vnpflyafig vkfrndlfkl
fkdlgclsqe qlrqwsscrh irrssmsvea ettttfsp
Human CCR7 cDNA
(SEQ ID NO: 44)
atggacctggggaaaccaatgaaaagcgtgctggtggtggctctccttgt
cattttccaggtatgcctgtgtcaagatgaggtcacggacgattacatcg
gagacaacaccacagtggactacactttgttcgagtctttgtgctccaag
aaggacgtgcggaactttaaagcctggttcctccctatcatgtactccat
catttgtttcgtgggcctactgggcaatgggctggtcgtgttgacctata
tctatttcaagaggctcaagaccatgaccgatacctacctgctcaacctg
gcggtggcagacatcctcttcctcctgacccttcccttctgggcctacag
cgcggccaagtcctgggtcttcggtgtccacttttgcaagctcatctttg
ccatctacaagatgagcttcttcagtggcatgctcctacttctttgcatc
agcattgaccgctacgtggccatcgtccaggctgtctcagctcaccgcca
ccgtgcccgcgtccttctcatcagcaagctgtcctgtgtgggcatctgga
tactagccacagtgctctccatcccagagctcctgtacagtgacctccag
aggagcagcagtgagcaagcgatgcgatgctctctcatcacagagcatgt
ggaggcctttatcaccatccaggtggcccagatggtgatcggctttctgg
tccccctgctggccatgagcttctgttaccttgtcatcatccgcaccctg
ctccaggcacgcaactttgagcgcaacaaggccatcaaggtgatcatcgc
tgtggtcgtggtcttcatagtcttccagctgccctacaatggggtggtcc
tggcccagacggtggccaacttcaacatcaccagtagcacctgtgagctc
agtaagcaactcaacatcgcctacgacgtcacctacagcctggcctgcgt
ccgctgctgcgtcaaccctttcttgtacgccttcatcggcgtcaagttcc
gcaacgatctcttcaagctcttcaaggacctgggctgcctcagccaggag
cagctccggcagtggtcttcctgtcggcacatccggcgctcctccatgag
tgtggaggccgagaccaccaccaccttctccccatag

The protein and cDNA sequences for mature human CXCR3 are shown below.

Mature Human CXCR3 Protein
(SEQ ID NO: 45)
mvlevsdhqv lndaevaall enfsssydyg enesdsccts
ppcpqdfsln fdraflpaly sllfllgllg ngavaavlls
rrtalsstdt fllhlavadt llvltlplwa vdaavqwvfg
sglckvagal fninfyagal llacisfdry lnivhatqly
rrgpparvtl tclavwglcl lfalpdfifl sahhderlna
thcqynfpqv grtalrvlql vagfllpllv maycyahila
vllvsrgqrr lramrlvvvv vvafalcwtp yhlvvlvdil
mdlgalarnc gresrvdvak svtsglgymh cclnpllyaf
vgvkfrermw mlllrlgcpn qrglqrqpss srrdsswset
seasysgl
Human CXCR3 cDNA
(SEQ ID NO: 46)
atggagttgaggaagtacggccctggaagactggcggggacagttatagg
aggagctgctcagagtaaatcacagactaaatcagactcaatcacaaaag
agttcctgccaggcctttacacagccccttcctccccgttcccgccctca
caggtgagtgaccaccaagtgctaaatgacgccgaggttgccgccctcct
ggagaacttcagctcttcctatgactatggagaaaacgagagtgactcgt
gctgtacctccccgccctgcccacaggacttcagcctgaacttcgaccgg
gccttcctgccagccctctacagcctcctctttctgctggggctgctggg
caacggcgcggtggcagccgtgctgctgagccggcggacagccctgagca
gcaccgacaccttcctgctccacctagctgtagcagacacgctgctggtg
ctgacactgccgctctgggcagtggacgctgccgtccagtgggtctttgg
ctctggcctctgcaaagtggcaggtgccctcttcaacatcaacttctacg
caggagccctcctgctggcctgcatcagctttgaccgctacctgaacata
gttcatgccacccagctctaccgccgggggcccccggcccgcgtgaccct
cacctgcctggctgtctgggggctctgcctgcttttcgccctcccagact
tcatcttcctgtcggcccaccacgacgagcgcctcaacgccacccactgc
caatacaacttcccacaggtgggccgcacggctctgcgggtgctgcagct
ggtggctggctttctgctgcccctgctggtcatggcctactgctatgccc
acatcctggccgtgctgctggtttccaggggccagcggcgcctgcgggcc
atgcggctggtggtggtggtcgtggtggcctttgccctctgctggacccc
ctatcacctggtggtgctggtggacatcctcatggacctgggcgctttgg
cccgcaactgtggccgagaaagcagggtagacgtggccaagtcggtcacc
tcaggcctgggctacatgcactgctgcctcaacccgctgctctatgcctt
tgtaggggtcaagttccgggagcggatgtggatgctgctcttgcgcctgg
gctgccccaaccagagagggctccagaggcagccatcgtcttcccgccgg
gattcatcctggtctgagacctcagaggcctcctactcgggcttgtga

The protein and cDNA sequences for mature human L-selectin are shown below.

Mature Human L-Selectin Protein
(SEQ ID NO: 47)
df lahhgtdcwt yhysekpmnw qrarrfcrdn ytdlvaiqnk
aeieylektl pfsrsyywig irkiggiwtw vgtnksltee
aenwgdgepn nkknkedcve iyikrnkdag kwnddachkl
kaalcytasc qpwscsghge cveiinnytc ncdvgyygpq
cqfviqcepl eapelgtmdc thplgnfsfs sqcafscseg
tnltgieett cgpfgnwssp eptcqviqce plsapdlgim
ncshplasfs ftsactfics egteligkkk ticessgiws
npspicqkld ksfsmikegd ynplfipvav mvtafsglaf
iiwlarrlkk gkkskrsmnd py
Human L-Selectin cDNA
(SEQ ID NO: 48)
atgggctgcagaagaactagagaaggaccaagcaaagccatgatatttcc
atggaaatgtcagagcacccagagggacttatggaacatcttcaagttgt
gggggtggacaatgctctgttgtgatttcctggcacatcatggaaccgac
tgctggacttaccattattctgaaaaacccatgaactggcaaagggctag
aagattctgccgagacaattacacagatttagttgccatacaaaacaagg
cggaaattgagtatctggagaagactctgcctttcagtcgttcttactac
tggataggaatccggaagataggaggaatatggacgtgggtgggaaccaa
caaatctcttactgaagaagcagagaactggggagatggtgagcccaaca
acaagaagaacaaggaggactgcgtggagatctatatcaagagaaacaaa
gatgcaggcaaatggaacgatgacgcctgccacaaactaaaggcagccct
ctgttacacagcttcttgccagccctggtcatgcagtggccatggagaat
gtgtagaaatcatcaataattacacctgcaactgtgatgtggggtactat
gggccccagtgtcagtttgtgattcagtgtgagcctttggaggccccaga
gctgggtaccatggactgtactcaccctttgggaaacttcagcttcagct
cacagtgtgccttcagctgctctgaaggaacaaacttaactgggattgaa
gaaaccacctgtggaccatttggaaactggtcatctccagaaccaacctg
tcaagtgattcagtgtgagcctctatcagcaccagatttggggatcatga
actgtagccatcccctggccagcttcagctttacctctgcatgtaccttc
atctgctcagaaggaactgagttaattgggaagaagaaaaccatttgtga
atcatctggaatctggtcaaatcctagtccaatatgtcaaaaattggaca
aaagtttctcaatgattaaggagggtgattataaccccctcttcattcca
gtggcagtcatggttactgcattctctgggttggcatttatcatttggct
ggcaaggagattaaaaaaaggcaagaaatccaagagaagtatgaatgacc
catattaa

The protein and cDNA sequences for mature human CXCR1 are shown below.

Mature Human CXCR1 Protein
(SEQ ID NO: 49)
msnitdpqmw dfddlnftgm ppadedyspc xletetlnky
vviiayalvf llsllgnslv mlvilysrvg rsvtdvylln
laladllfal tlpiwaaskv ngwifgtflc kvvsllkevn
fysgilllac isvdrylaiv hatrtltqkr hlvkfvclgc
wglsmnlslp fflfrqayhp nnsspvcyev lgndtakwrm
vlrilphtfg fivplfvmlf cygftlrtlf kahmgqkhra
mrvifavvli fllcwlpynl vlladtlmrt qviqescerr
nnigraldat eilgflhscl npiiyafigq nfrhgflkil
amhglvskef larhrvtsyt sssvnvssnl
Human CXCR1 cDNA
(SEQ ID NO: 50)
atgtcaaatattacagatccacagatgtgggattttgatgatctaaattt
cactggcatgccacctgcagatgaagattacagcccctgtatgctagaaa
ctgagacactcaacaagtatgttgtgatcatcgcctatgccctagtgttc
ctgctgagcctgctgggaaactccctggtgatgctggtcatcttatacag
cagggtcggccgctccgtcactgatgtctacctgctgaacctggccttgg
ccgacctactctttgccctgaccttgcccatctgggccgcctccaaggtg
aatggctggatttttggcacattcctgtgcaaggtggtctcactcctgaa
ggaagtcaacttctacagtggcatcctgctgttggcctgcatcagtgtgg
accgttacctggccattgtccatgccacacgcacactgacccagaagcgt
cacttggtcaagtttgtttgtcttggctgctggggactgtctatgaatct
gtccctgcccttcttccttttccgccaggcttaccatccaaacaattcca
gtccagtttgctatgaggtcctgggaaatgacacagcaaaatggcggatg
gtgttgcggatcctgcctcacacctttggcttcatcgtgccgctgtttgt
catgctgttctgctatggattcaccctgcgtacactgtttaaggcccaca
tggggcagaagcaccgagccatgagggtcatctttgctgtcgtcctcatc
ttcctgctttgctggctgccctacaacctggtcctgctggcagacaccct
catgaggacccaggtgatccaggagagctgtgagcgccgcaacaacatcg
gccgggccctggatgccactgagattctgggatttctccatagctgcctc
aaccccatcatctacgccttcatcggccaaaattttcgccatggattcct
caagatcctggctatgcatggcctggtcagcaaggagttcttggcacgtc
atcgtgttacctcctacacttcttcgtctgtcaatgtctcttccaacctc
tga

The protein and cDNA sequences for mature human CXCR2 are shown below.

Mature Human CXCR2 Protein
(SEQ ID NO: 51)
medfnmesds fedfwkgedl snysysstlp pflldaapce
pesleinkyf vviiyalvfl lsllgnslvm lvilysrvgr
svtdvyllnl aladllfalt lpiwaaskvn gwifgtflck
vvsllkevnf ysgilllaci svdrylaivh atrtltqkry
lvkficlsiw glslllalpv llfrrtvyss nvspacyedm
gnntanwrml lrilpqsfgf ivpllimlfc ygftlrtlfk
ahmgqkhram rvifavvlif llcwlpynlv lladtlmrtq
viqetcerrn hidraldate ilgilhscln pliyafigqk
frhgllkila ihgliskdsl pkdsrpsfvg sssghtsttl
Human CXCR2 cDNA
(SEQ ID NO: 52)
atggaagattttaacatggagagtgacagctttgaagatttctggaaagg
tgaagatcttagtaattacagttacagctctaccctgcccccttttctac
tagatgccgccccatgtgaaccagaatccctggaaatcaacaagtatttt
gtggtcattatctatgccctggtattcctgctgagcctgctgggaaactc
cctcgtgatgctggtcatcttatacagcagggtcggccgctccgtcactg
atgtctacctgctgaacctagccttggccgacctactctttgccctgacc
ttgcccatctgggccgcctccaaggtgaatggctggatttttggcacatt
cctgtgcaaggtggtctcactcctgaaggaagtcaacttctatagtggca
tcctgctactggcctgcatcagtgtggaccgttacctggccattgtccat
gccacacgcacactgacccagaagcgctacttggtcaaattcatatgtct
cagcatctggggtctgtccttgctcctggccctgcctgtcttacttttcc
gaaggaccgtctactcatccaatgttagcccagcctgctatgaggacatg
ggcaacaatacagcaaactggcggatgctgttacggatcctgccccagtc
ctttggcttcatcgtgccactgctgatcatgctgttctgctacggattca
ccctgcgtacgctgtttaaggcccacatggggcagaagcaccgggccatg
cgggtcatctttgctgtcgtcctcatcttcctgctctgctggctgcccta
caacctggtcctgctggcagacaccctcatgaggacccaggtgatccagg
agacctgtgagcgccgcaatcacatcgaccgggctctggatgccaccgag
attctgggcatccttcacagctgcctcaaccccctcatctacgccttcat
tggccagaagtttcgccatggactcctcaagattctagctatacatggct
tgatcagcaaggactccctgcccaaagacagcaggccttcctttgttggc
tcttcttcagggcacacttccactactctctaa

The protein and cDNA sequences for mature human CX3CR1 are shown below.

Mature Human CX3CR1 Protein
(SEQ ID NO: 53)
mdqfpesvte nfeyddlaea cyigdivvfg tvflsifysv
ifaiglvgnl lvvfaltnsk kpksvtdiyl lnlalsdllf
vatlpfwthy linekglhna mckfttafff igffgsiffi
tvisidryla ivlaansmnn rtvqhgvtis lgvwaaailv
aapqfmftkq keneclgdyp evlqeiwpvl rnvetnflgf
llpllimsyc yfriiqtlfs cknhkkakai klillvvivf
flfwtpynvm ifletlklyd ffpscdmrkd lrlalsvtet
vafshcclnp liyafagekf rrylyhlygk clavlcgrsv
hvdfsssesq rsrhgsvlss nftyhtsdgd allll
Human CX3CR1 cDNA
(SEQ ID NO: 54)
atggatcagttccctgaatcagtgacagaaaactttgagtacgatgattt
ggctgaggcctgttatattggggacatcgtggtctttgggactgtgttcc
tgtccatattctactccgtcatctttgccattggcctggtgggaaatttg
ttggtagtgtttgccctcaccaacagcaagaagcccaagagtgtcaccga
catttacctcctgaacctggccttgtctgatctgctgtttgtagccactt
tgcccttctggactcactatttgataaatgaaaagggcctccacaatgcc
atgtgcaaattcactaccgccttcttcttcatcggcttttttggaagcat
attcttcatcaccgtcatcagcattgataggtacctggccatcgtcctgg
ccgccaactccatgaacaaccggaccgtgcagcatggcgtcaccatcagc
ctaggcgtctgggcagcagccattttggtggcagcaccccagttcatgtt
cacaaagcagaaagaaaatgaatgccttggtgactaccccgaggtcctcc
aggaaatctggcccgtgctccgcaatgtggaaacaaattttcttggcttc
ctactccccctgctcattatgagttattgctacttcagaatcatccagac
gctgttttcctgcaagaaccacaagaaagccaaagccattaaactgatcc
ttctggtggtcatcgtgtttttcctcttctggacaccctacaacgttatg
attttcctggagacgcttaagctctatgacttctttcccagttgtgacat
gaggaaggatctgaggctggccctcagtgtgactgagacggttgcattta
gccattgttgcctgaatcctctcatctatgcatttgctggggagaagttc
agaagatacctttaccacctgtatgggaaatgcctggctgtcctgtgtgg
gcgctcagtccacgttgatttctcctcatctgaatcacaaaggagcaggc
atggaagtgttctgagcagcaattttacttaccacacgagtgatggagat
gcattgctccttctctga

The protein and cDNA sequences for mature human ChemR23 are shown below.

Mature Human ChemR23 Protein
(SEQ ID NO: 55)
mrmededynt sisygdeypd yldsivvled lsplearvtr
iflvvvysiv cflgilgngl viiiatfkmk ktvnmvwfln
lavadflfnv flpihityaa mdyhwvfgta mckisnflli
hnmftsvfll tiissdrcis vllpvwsqnh rsvrlaymac
mviwvlaffl sspslvfrdt anlhgkiscf nnfslstpgs
sswpthsqmd pvgysrhmvv tvtrflcgfl vpvliitacy
ltivcklqrn rlaktkkpfk iivtiiitff lcwcpyhtln
llelhhtamp gsvfslglpl atalaiansc mnpilyvfmg
qdfkkfkval fsrlvnalse dtghssypsh rsftkmssmn
ertsmneret gml
Human ChemR23 cDNA
(SEQ ID NO: 56)
atgagaatggaggatgaagattacaacacttccatcagttacggtgatga
ataccctgattatttagactccattgtggttttggaggacttatccccct
tggaagccagggtgaccaggatcttcctggtggtggtctacagcatcgtc
tgcttcctcgggattctgggcaatggtctggtgatcatcattgccacctt
caagatgaagaagacagtgaacatggtctggttcctcaacctggcagtgg
cagatttcctgttcaacgtcttcctcccaatccatatcacctatgccgcc
atggactaccactgggttttcgggacagccatgtgcaagatcagcaactt
ccttctcatccacaacatgttcaccagcgtcttcctgctgaccatcatca
gctctgaccgctgcatctctgtgctcctccctgtctggtcccagaaccac
cgcagcgttcgcctggcttacatggcctgcatggtcatctgggtcctggc
tttcttcttgagttccccatctctcgtcttccgggacacagccaacctgc
atgggaaaatatcctgcttcaacaacttcagcctgtccacacctgggtct
tcctcgtggcccactcactcccaaatggaccctgtggggtatagccggca
catggtggtgactgtcacccgcttcctctgtggcttcctggtcccagtcc
tcatcatcacagcttgctacctcaccatcgtgtgcaaactgcagcgcaac
cgcctggccaagaccaagaagcccttcaagattattgtgaccatcatcat
taccttcttcctctgctggtgcccctaccacacactcaacctcctagagc
tccaccacactgccatgcctggctctgtcttcagcctgggtttgcccctg
gccactgcccttgccattgccaacagctgcatgaaccccattctgtatgt
tttcatgggtcaggacttcaagaagttcaaggtggccctcttctctcgcc
tggtcaatgctctaagtgaagatacaggccactcttcctaccccagccat
agaagctttaccaagatgtcatcaatgaatgagaggacttctatgaatga
gagggagaccggcatgctttga

The protein and cDNA sequences for mature human CXCR4 are shown below.

Mature Human CXCR4 Protein
(SEQ ID NO: 57)
megisiytsd nyteemgsgd ydsmkepcfr eenanfnkif
lptiysiifl tgivgnglvi lvmgyqkklr smtdkyrlhl
svadllfvit lpfwavdava nwyfgnflck avhviytvnl
yssvlilafi sldrylaivh atnsgrprkl laekvvyvgv
wipallltip dfifanvsea ddryicdrfy pndlwvvvfq
fqhimvglil pgivilscyc iiisklshsk ghqkrkalkt
tvililaffa cwlpyyigis idsfilleii kqgcefentv
hkwisiteal affhcclnpi lyaflgakfk tsaqhaltsv
srgsslkils kgkrgghssv stesesssfh ss
Human CXCR4 cDNA
(SEQ ID NO: 58)
atgtccattcctttgcctcttttgcagatatacacttcagataactacac
cgaggaaatgggctcaggggactatgactccatgaaggaaccctgtttcc
gtgaagaaaatgctaatttcaataaaatcttcctgcccaccatctactcc
atcatcttcttaactggcattgtgggcaatggattggtcatcctggtcat
gggttaccagaagaaactgagaagcatgacggacaagtacaggctgcacc
tgtcagtggccgacctcctctttgtcatcacgcttcccttctgggcagtt
gatgccgtggcaaactggtactttgggaacttcctatgcaaggcagtcca
tgtcatctacacagtcaacctctacagcagtgtcctcatcctggccttca
tcagtctggaccgctacctggccatcgtccacgccaccaacagtcagagg
ccaaggaagctgttggctgaaaaggtggtctatgttggcgtctggatccc
tgccctcctgctgactattcccgacttcatctttgccaacgtcagtgagg
cagatgacagatatatctgtgaccgcttctaccccaatgacttgtgggtg
gttgtgttccagtttcagcacatcatggttggccttatcctgcctggtat
tgtcatcctgtcctgctattgcattatcatctccaagctgtcacactcca
agggccaccagaagcgcaaggccctcaagaccacagtcatcctcatcctg
gctttcttcgcctgttggctgccttactacattgggatcagcatcgactc
cttcatcctcctggaaatcatcaagcaagggtgtgagtttgagaacactg
tgcacaagtggatttccatcaccgaggccctagctttcttccactgttgt
ctgaaccccatcctctatgctttccttggagccaaatttaaaacctctgc
ccagcacgcactcacctctgtgagcagagggtccagcctcaagatcctct
ccaaaggaaagcgaggtggacattcatctgtttccactgagtctgagtct
tcaagttttcactccagctaa

The protein and cDNA sequences for mature human CCR5 are shown below.

Mature Human CCR5 Protein
(SEQ ID NO: 59)
[sequence omitted]
Human CCR5 cDNA
(SEQ ID NO: 60)
atggattatcaagtgtcaagtccaatctatgacatcaattattatacatc
ggagccctgccaaaaaatcaatgtgaagcaaatcgcagcccgcctcctgc
ctccgctctactcactggtgttcatctttggttttgtgggcaacatgctg
gtcatcctcatcctgataaactgcaaaaggctgaagagcatgactgacat
ctacctgctcaacctggccatctctgacctgtttttccttcttactgtcc
ccttctgggctcactatgctgccgcccagtgggactttggaaatacaatg
tgtcaactcttgacagggctctattttataggcttcttctctggaatctt
cttcatcatcctcctgacaatcgataggtacctggctgtcgtccatgctg
tgtttgctttaaaagccaggacggtcacctttggggtggtgacaagtgtg
atcacttgggtggtggctgtgtttgcgtctctcccaggaatcatctttac
cagatctcaaaaagaaggtcttcattacacctgcagctctcattttccat
acagtcagtatcaattctggaagaatttccagacattaaagatagtcatc
ttggggctggtcctgccgctgcttgtcatggtcatctgctactcgggaat
cctaaaaactctgcttcggtgtcgaaatgagaagaagaggcacagggctg
tgaggcttatcttcaccatcatgattgtttattttctcttctgggctccc
tacaacattgtccttctcctgaacaccttccaggaattctttggcctgaa
taattgcagtagctctaacaggttggaccaagctatgcaggtgacagaga
ctcttgggatgacgcactgctgcatcaaccccatcatctatgcctttgtc
ggggagaagttcagaaactacctcttagtcttcttccaaaagcacattgc
caaacgcttctgcaaatgctgttctattttccagcaagaggctcccgagc
gagcaagctcagtttacacccgatccactggggagcaggaaatatctgtg
ggcttgtga

The protein and cDNA sequences for mature human SIP5 are shown below.

Mature Human S1P5 Protein
(SEQ ID NO: 61)
mesgllrpap vsevivlhyn ytgklrgary qpgaglrada
vvclavcafi vlenlavllv lgrhprfhap mflllgsltl
sdllagaaya anillsgplt lklspalwfa reggvfvalt
asvlsllaia lersltmarr gpapvssrgr tlamaaaawg
vslllgllpa lgwnclgrld acstvlplya kayvlfcvla
fvgilaaica lyariycqvr anarrlparp gtagttstra
rrkprslall rtlsvvllaf vacwgplfll llldvacpar
tcpvllqadp flglamansl lnpiiytltn rdlrhallrl
vccgrhscgr dpsgsqqsas aaeasgglrr clppgldgsf
sgsersspqr dgldtsgstg spgaptaart lvsepaad
Human S1P5 cDNA
(SEQ ID NO: 62)
atggagtcggggctgctgcggccggcgccggtgagcgaggtcatcgtcct
gcattacaactacaccggcaagctccgcggtgcgcgctaccagccgggtg
ccggcctgcgcgccgacgccgtggtgtgcctggcggtgtgcgccttcatc
gtgctagagaatctagccgtgttgttggtgctcggacgccacccgcgctt
ccacgctcccatgttcctgctcctgggcagcctcacgttgtcggatctgc
tggcaggcgccgcctacgccgccaacatcctactgtcggggccgctcacg
ctgaaactgtcccccgcgctctggttcgcacgggagggaggcgtcttcgt
ggcactcactgcgtccgtgctgagcctcctggccatcgcgctggagcgca
gcctcaccatggcgcgcagggggcccgcgcccgtctccagtcgggggcgc
acgctggcgatggcagccgcggcctggggcgtgtcgctgctcctcgggct
cctgccagcgctgggctggaattgcctgggtcgcctggacgcttgctcca
ctgtcttgccgctctacgccaaggcctacgtgctcttctgcgtgctcgcc
ttcgtgggcatcctggccgctatctgtgcactctacgcgcgcatctactg
ccaggtacgcgccaacgcgcggcgcctgccggcacggcccgggactgcgg
ggaccacctcgacccgggcgcgtcgcaagccgcgctcgctggccttgctg
cgcacgctcagcgtggtgctcctggcctttgtggcatgttggggccccct
cttcctgctgctgttgctcgacgtggcgtgcccggcgcgcacctgtcctg
tactcctgcaggccgatcccttcctgggactggccatggccaactcactt
ctgaaccccatcatctacacgctcaccaaccgcgacctgcgccacgcgct
cctgcgcctggtctgctgcggacgccactcctgcggcagagacccgagtg
gctcccagcagtcggcgagcgcggctgaggcttccgggggcctgcgccgc
tgcctgcccccgggccttgatgggagcttcagcggctcggagcgctcatc
gccccagcgcgacgggctggacaccagcggctccacaggcagccccggtg
cacccacagccgcccggactctggtatcagaaccggctgcagactga

The protein and cDNA sequences for mature human C-kit are shown below.

Mature Human C-kit Protein
(SEQ ID NO: 63)
qpsvs pgepsppsih pgksdlivrv gdeirllctd pgfvkwtfei
ldetnenkqn ewitekaeat ntgkytctnk hglsnsiyvf
vrdpaklflv drslygkedn dtlvrcpltd pevtnyslkg
cqgkplpkdl rfipdpkagi miksvkrayh rlclhcsvdq
egksvlsekf ilkvrpafka vpvvsvskas yllregeeft
vtctikdvss svystwkren sqtklqekyn swhhgdfnye
rqatltissa rvndsgvfmc yanntfgsan vtttlevvdk
gfinifpmin ttvfvndgen vdliveyeaf pkpehqqwiy
mnrtftdkwe dypksenesn iryvselhlt rlkgteggty
tflvsnsdvn aaiafnvyvn tkpeiltydr lvngmlqcva
agfpeptidw yfcpgteqrc sasvlpvdvq tlnssgppfg
klvvqssids safkhngtve ckayndvgkt sayfnfafkg
nnkeqihpht lftplligfv ivagmmciiv miltykylqk
pmyevqwkvv eeingnnyvy idptqlpydh kwefprnrls
fgktlgagaf gkvveatayg liksdaamtv avkmlkpsah
lterealmse lkvlsylgnh mnivnllgac tiggptlvit
eyccygdlln flrrkrdsfi cskqedhaea alyknllhsk
esscsdstne ymdmkpgvsy vvptkadkrr svrigsyier
dvtpaimedd elaldledll sfsyqvakgm aflaskncih
rdlaarnill thgritkicd fglardiknd snyvvkgnar
lpvkwmapes ifncvytfes dvwsygiflw elfslgsspy
pgmpvdskfy kmikegfrml spehapaemy dimktcwdad
plkrptfkqi vqliekqise stnhiysnla ncspnrqkpv
vdhsvrinsv gstasssqpl lvhddv
Human C-kit cDNA
(SEQ ID NO: 64)
atgagaggcgctcgcggcgcctgggattttctctgcgttctgctcctact
gcttcgcgtccagacaggctcttctcaaccatctgtgagtccaggggaac
cgtctccaccatccatccatccaggaaaatcagacttaatagtccgcgtg
ggcgacgagattaggctgttatgcactgatccgggctttgtcaaatggac
ttttgagatcctggatgaaacgaatgagaataagcagaatgaatggatca
cggaaaaggcagaagccaccaacaccggcaaatacacgtgcaccaacaaa
cacggcttaagcaattccatttatgtgtttgttagagatcctgccaagct
tttccttgttgaccgctccttgtatgggaaagaagacaacgacacgctgg
tccgctgtcctctcacagacccagaagtgaccaattattccctcaagggg
tgccaggggaagcctcttcccaaggacttgaggtttattcctgaccccaa
ggcgggcatcatgatcaaaagtgtgaaacgcgcctaccatcggctctgtc
tgcattgttctgtggaccaggagggcaagtcagtgctgtcggaaaaattc
atcctgaaagtgaggccagccttcaaagctgtgcctgttgtgtctgtgtc
caaagcaagctatcttcttagggaaggggaagaattcacagtgacgtgca
caataaaagatgtgtctagttctgtgtactcaacgtggaaaagagaaaac
agtcagactaaactacaggagaaatataatagctggcatcacggtgactt
caattatgaacgtcaggcaacgttgactatcagttcagcgagagttaatg
attctggagtgttcatgtgttatgccaataatacttttggatcagcaaat
gtcacaacaaccttggaagtagtagataaaggattcattaatatcttccc
catgataaacactacagtatttgtaaacgatggagaaaatgtagatttga
ttgttgaatatgaagcattccccaaacctgaacaccagcagtggatctat
atgaacagaaccttcactgataaatgggaagattatcccaagtctgagaa
tgaaagtaatatcagatacgtaagtgaacttcatctaacgagattaaaag
gcaccgaaggaggcacttacacattcctagtgtccaattctgacgtcaat
gctgccatagcatttaatgtttatgtgaatacaaaaccagaaatcctgac
ttacgacaggctcgtgaatggcatgctccaatgtgtggcagcaggattcc
cagagcccacaatagattggtatttttgtccaggaactgagcagagatgc
tctgcttctgtactgccagtggatgtgcagacactaaactcatctgggcc
accgtttggaaagctagtggttcagagttctatagattctagtgcattca
agcacaatggcacggttgaatgtaaggcttacaacgatgtgggcaagact
tctgcctattttaactttgcatttaaaggtaacaacaaagagcaaatcca
tccccacaccctgttcactcctttgctgattggtttcgtaatcgtagctg
gcatgatgtgcattattgtgatgattctgacctacaaatatttacagaaa
cccatgtatgaagtacagtggaaggttgttgaggagataaatggaaacaa
ttatgtttacatagacccaacacaacttccttatgatcacaaatgggagt
ttcccagaaacaggctgagttttgggaaaaccctgggtgctggagctttc
gggaaggttgttgaggcaactgcttatggcttaattaagtcagatgcggc
catgactgtcgctgtaaagatgctcaagccgagtgcccatttgacagaac
gggaagccctcatgtctgaactcaaagtcctgagttaccttggtaatcac
atgaatattgtgaatctacttggagcctgcaccattggagggcccaccct
ggtcattacagaatattgttgctatggtgatcttttgaattttttgagaa
gaaaacgtgattcatttatttgttcaaagcaggaagatcatgcagaagct
gcactttataagaatcttctgcattcaaaggagtcttcctgcagcgatag
tactaatgagtacatggacatgaaacctggagtttcttatgttgtcccaa
ccaaggccgacaaaaggagatctgtgagaataggctcatacatagaaaga
gatgtgactcccgccatcatggaggatgacgagttggccctagacttaga
agacttgctgagcttttcttaccaggtggcaaagggcatggctttcctcg
cctccaagaattgtattcacagagacttggcagccagaaatatcctcctt
actcatggtcggatcacaaagatttgtgattttggtctagccagagacat
caagaatgattctaattatgtggttaaaggaaacgctcgactacctgtga
agtggatggcacctgaaagcattttcaactgtgtatacacgtttgaaagt
gacgtctggtcctatgggatttttctttgggagctgttctctttaggaag
cagcccctatcctggaatgccggtcgattctaagttctacaagatgatca
aggaaggcttccggatgctcagccctgaacacgcacctgctgaaatgtat
gacataatgaagacttgctgggatgcagatcccctaaaaagaccaacatt
caagcaaattgttcagctaattgagaagcagatttcagagagcaccaatc
atatttactccaacttagcaaactgcagccccaaccgacagaagcccgtg
gtagaccattctgtgcggatcaattctgtcggcagcaccgcttcctcctc
ccagcctctgcttgtgcacgacgatgtctga

The protein and cDNA sequences for mature human mTOR are shown below.

Mature Human mTOR Protein
(SEQ ID NO: 65)
mlgtgpaaat taattssnvs vlqqfasglk srneetraka
akelqhyvtm elremsqees trfydqlnhh ifelvsssda
nerkggilai asligveggn atrigrfany lrnllpsndp
vvmemaskai grlamagdtf taeyvefevk ralewlgadr
negrrhaavl vlrelaisvp tfffqqvqpf fdnifvavwd
pkqairegav aalraclilt tqrepkemqk pqwyrhtfee
aekgfdetla kekgmnrddr ihgallilne lvrissmege
rlreemeeit qqqlvhdkyc kdlmgfgtkp rhitpftsfq
avqpqqsnal vgllgysshq glmgfgtsps pakstlvesr
ccrdlmeekf dqvcqwvlkc rnsknsliqm tilnllprla
afrpsaftdt qylqdtmnhv lscvkkeker taafqalgll
svavrsefkv ylprvldiir aalppkdfah krqkamqvda
tvftcismla ramgpgiqqd ikellepmla vglspaltav
lydlsrqipq lkkdiqdgll kmlslvlmhk plrhpgmpkg
lahglaspgl ttlpeasdvg sitlalrtlg sfefeghslt
qfvrhcadhf lnsehkeirm eaartcsrll tpsihlisgh
ahvvsqtavq vvadvlskll vvgitdpdpd irycvlasld
erfdahlaqa enlqalfval ndqvfeirel aictvgrlss
mnpafvmpfl rkmliqilte lehsgigrik eqsarmlghl
vsnaprlirp ymepilkali lklkdpdpdp npgvinnvla
tigelaqvsg lemrkwvdel fiiimdmlqd ssllakrqva
lwtlgqlvas tgyvvepyrk yptllevlln flkteqnqgt
rreairvlgl lgaldpykhk vnigmidqsr dasavslses
kssqdssdys tsemlvnmgn lpldefypav smvalmrifr
dqslshhhtm vvqaitfifk slglkcvqfl pqvmptflnv
irvcdgaire flfqqlgmlv sfvkshirpy mdeivtlmre
fwvmntsiqs tiilliegiv valggefkly lpqliphmlr
vfmhdnspgr ivsikllaai qlfganlddy lhlllppivk
lfdapeaplp srkaaletvd rltesldftd yasriihpiv
rtldqspelr stamdtlssl vfqlgkkyqi fipmvnkvlv
rhrinhqryd vlicrivkgy tladeeedpl iyqhrmlrsg
qgdalasgpv etgpmkklhv stinlqkawg aarrvskddw
lewlrrlsle llkdssspsl rscwalaqay npmardlfna
afvscwseln edqqdelirs ielaltsqdi aevtqtllnl
aefmehsdkg plplrddngi vllgeraakc rayakalhyk
elefqkgptp aileslisin nklqqpeaaa gvleyamkhf
geleiqatwy eklhewedal vaydkkmdtn kddpelmlgr
mrclealgew gqlhqqccek wtlvndetqa kmarmaaaaa
wglgqwdsme eytcmiprdt hdgafyravl alhqdlfsla
qqcidkardl ldaeltamag esysraygam vschmlsele
eviqyklype rreiirqiww erlqgcqriv edwqkilmvr
slvvsphedm rtwlkyaslc gksgrlalah ktlvlllgvd
psrqldhplp tvhpqvtyay mknmwksark idafqhmqhf
vqtmqqqaqh aiatedqqhk qelhklmarc flklgewqln
lqginestip kvlqyysaat ehdrswykaw hawavmnfea
vlhykhqnqa rdekkklrha sganitnatt aattaatatt
tastegsnse seaestensp tpsplqkkvt edlsktllmy
tvpavqgffr sislsrgnnl qdtlrvltlw fdyghwpdvn
ealvegvkai qidtwlqvip qliaridtpr plvgrlihql
ltdigryhpq aliypltvas kstttarhna ankilknmce
hsntlvqqam mvseelirva ilwhemwheg leeasrlyfg
ernvkgmfev leplhammer gpqtlketsf nqaygrdlme
aqewcrkymk sgnvkdltqa wdlyyhvfrr iskqlpqlts
lelgyvspkl lmcrdlelav pgtydpnqpi iriqsiapsl
qvitskqrpr kltlmgsngh efvfllkghe dlrqdervmq
lfglvntlla ndptslrknl siqryavipl stnsgligwv
phcdtlhali rdyrekkkil lniehrimlr mapdydhltl
mqkvevfeha vnntagddla kllwlkspss evwfdrrtny
trslavmsmv gyilglgdrh psnlmldrls gkilhidfgd
cfevamtrek fpekipfrlt rmltnamevt gldgnyritc
htvmevlreh kdsvmavlea fvydpllnwr lmdtntkgnk
rsrtrtdsys agqsveildg velgepahkk tgttvpesih
sfigdglvkp ealnkkaiqi inrvrdkltg rdfshddtld
vptqvellik qatshenlcq cyigwcpfw
Human mTOR cDNA
(SEQ ID NO: 66)
atgcttgga accggacctg ccgccgccac caccgctgcc
accacatcta gcaatgtgag cgtcctgcag cagtttgcca
gtggcctaaa gagccggaat gaggaaacca gggccaaagc
cgccaaggag ctccagcact atgtcaccat ggaactccga
gagatgagtc aagaggagtc tactcgcttc tatgaccaac
tgaaccatca catttttgaa ttggtttcca gctcagatgc
caatgagagg aaaggtggca tcttggccat agctagcctc
ataggagtgg aaggtgggaa tgccacccga attggcagat
ttgccaacta tcttcggaac ctcctcccct ccaatgaccc
agttgtcatg gaaatggcat ccaaggccat tggccgtctt
gccatggcag gggacacttt taccgctgag tacgtggaat
ttgaggtgaa gcgagccctg gaatggctgg gtgctgaccg
caatgagggc cggagacatg cagctgtcct ggttctccgt
gagctggcca tcagcgtccc taccttcttc ttccagcaag
tgcaaccctt ctttgacaac atttttgtgg ccgtgtggga
ccccaaacag gccatccgtg agggagctgt agccgccctt
cgtgcctgtc tgattctcac aacccagcgt gagccgaagg
agatgcagaa gcctcagtgg tacaggcaca catttgaaga
agcagagaag ggatttgatg agaccttggc caaagagaag
ggcatgaatc gggatgatcg gatccatgga gccttgttga
tccttaacga gctggtccga atcagcagca tggagggaga
gcgtctgaga gaagaaatgg aagaaatcac acagcagcag
ctggtacacg acaagtactg caaagatctc atgggcttcg
gaacaaaacc tcgtcacatt acccccttca ccagtttcca
ggctgtacag ccccagcagt caaatgcctt ggtggggctg
ctggggtaca gctctcacca aggcctcatg ggatttggga
cctcccccag tccagctaag tccaccctgg tggagagccg
gtgttgcaga gacttgatgg aggagaaatt tgatcaggtg
tgccagtggg tgctgaaatg caggaatagc aagaactcgc
tgatccaaat gacaatcctt aatttgttgc cccgcttggc
tgcattccga ccttctgcct tcacagatac ccagtatctc
caagatacca tgaaccatgt cctaagctgt gtcaagaagg
agaaggaacg tacagcggcc ttccaagccc tggggctact
ttctgtggct gtgaggtctg agtttaaggt ctatttgcct
cgcgtgctgg acatcatccg agcggccctg cccccaaagg
acttcgccca taagaggcag aaggcaatgc aggtggatgc
cacagtcttc acttgcatca gcatgctggc tcgagcaatg
gggccaggca tccagcagga tatcaaggag ctgctggagc
ccatgctggc agtgggacta agccctgccc tcactgcagt
gctctacgac ctgagccgtc agattccaca gctaaagaag
gacattcaag atgggctact gaaaatgctg tccctggtcc
ttatgcacaa accccttcgc cacccaggca tgcccaaggg
cctggcccat cagctggcct ctcctggcct cacgaccctc
cctgaggcca gcgatgtggg cagcatcact cttgccctcc
gaacgcttgg cagctttgaa tttgaaggcc actctctgac
ccaatttgtt cgccactgtg cggatcattt cctgaacagt
gagcacaagg agatccgcat ggaggctgcc cgcacctgct
cccgcctgct cacaccctcc atccacctca tcagtggcca
tgctcatgtg gttagccaga ccgcagtgca agtggtggca
gatgtgctta gcaaactgct cgtagttggg ataacagatc
ctgaccctga cattcgctac tgtgtcttgg cgtccctgga
cgagcgcttt gatgcacacc tggcccaggc ggagaacttg
caggccttgt ttgtggctct gaatgaccag gtgtttgaga
tccgggagct ggccatctgc actgtgggcc gactcagtag
catgaaccct gcctttgtca tgcctttcct gcgcaagatg
ctcatccaga ttttgacaga gttggagcac agtgggattg
gaagaatcaa agagcagagt gcccgcatgc tggggcacct
ggtctccaat gccccccgac tcatccgccc ctacatggag
cctattctga aggcattaat tttgaaactg aaagatccag
accctgatcc aaacccaggt gtgatcaata atgtcctggc
aacaatagga gaattggcac aggttagtgg cctggaaatg
aggaaatggg ttgatgaact ttttattatc atcatggaca
tgctccagga ttcctctttg ttggccaaaa ggcaggtggc
tctgtggacc ctgggacagt tggtggccag cactggctat
gtagtagagc cctacaggaa gtaccctact ttgcttgagg
tgctactgaa ttttctgaag actgagcaga accagggtac
acgcagagag gccatccgtg tgttagggct tttaggggct
ttggatcctt acaagcacaa agtgaacatt ggcatgatag
accagtcccg ggatgcctct gctgtcagcc tgtcagaatc
caagtcaagt caggattcct ctgactatag cactagtgaa
atgctggtca acatgggaaa cttgcctctg gatgagttct
acccagctgt gtccatggtg gccctgatgc ggatcttccg
agaccagtca ctctctcatc atcacaccat ggttgtccag
gccatcacct tcatcttcaa gtccctggga ctcaaatgtg
tgcagttcct gccccaggtc atgcccacgt tccttaacgt
cattcgagtc tgtgatgggg ccatccggga atttttgttc
cagcagctgg gaatgttggt gtcctttgtg aagagccaca
tcagacctta tatggatgaa atagtcaccc tcatgagaga
attctgggtc atgaacacct caattcagag cacgatcatt
cttctcattg agcaaattgt ggtagctctt gggggtgaat
ttaagctcta cctgccccag ctgatcccac acatgctgcg
tgtcttcatg catgacaaca gcccaggccg cattgtctct
atcaagttac tggctgcaat ccagctgttt ggcgccaacc
tggatgacta cctgcattta ctgctgcctc ctattgttaa
gttgtttgat gcccctgaag ctccactgcc atctcgaaag
gcagcgctag agactgtgga ccgcctgacg gagtccctgg
atttcactga ctatgcctcc cggatcattc accctattgt
tcgaacactg gaccagagcc cagaactgcg ctccacagcc
atggacacgc tgtcttcact tgtttttcag ctggggaaga
agtaccaaat tttcattcca atggtgaata aagttctggt
gcgacaccga atcaatcatc agcgctatga tgtgctcatc
tgcagaattg tcaagggata cacacttgct gatgaagagg
aggatccttt gatttaccag catcggatgc ttaggagtgg
ccaaggggat gcattggcta gtggaccagt ggaaacagga
cccatgaaga aactgcacgt cagcaccatc aacctccaaa
aggcctgggg cgctgccagg agggtctcca aagatgactg
gctggaatgg ctgagacggc tgagcctgga gctgctgaag
gactcatcat cgccctccct gcgctcctgc tgggccctgg
cacaggccta caacccgatg gccagggatc tcttcaatgc
tgcatttgtg tcctgctggt ctgaactgaa tgaagatcaa
caggatgagc tcatcagaag catcgagttg gccctcacct
cacaagacat cgctgaagtc acacagaccc tcttaaactt
ggctgaattc atggaacaca gtgacaaggg ccccctgcca
ctgagagatg acaatggcat tgttctgctg ggtgagagag
ctgccaagtg ccgagcatat gccaaagcac tacactacaa
agaactggag ttccagaaag gccccacccc tgccattcta
gaatctctca tcagcattaa taataagcta cagcagccgg
aggcagcggc cggagtgtta gaatatgcca tgaaacactt
tggagagctg gagatccagg ctacctggta tgagaaactg
cacgagtggg aggatgccct tgtggcctat gacaagaaaa
tggacaccaa caaggacgac ccagagctga tgctgggccg
catgcgctgc ctcgaggcct tgggggaatg gggtcaactc
caccagcagt gctgtgaaaa gtggaccctg gttaatgatg
agacccaagc caagatggcc cggatggctg ctgcagctgc
atggggttta ggtcagtggg acagcatgga agaatacacc
tgtatgatcc ctcgggacac ccatgatggg gcattttata
gagctgtgct ggcactgcat caggacctct tctccttggc
acaacagtgc attgacaagg ccagggacct gctggatgct
gaattaactg cgatggcagg agagagttac agtcgggcat
atggggccat ggtttcttgc cacatgctgt ccgagctgga
ggaggttatc cagtacaaac ttgtccccga gcgacgagag
atcatccgcc agatctggtg ggagagactg cagggctgcc
agcgtatcgt agaggactgg cagaaaatcc ttatggtgcg
gtcccttgtg gtcagccctc atgaagacat gagaacctgg
ctcaagtatg caagcctgtg cggcaagagt ggcaggctgg
ctcttgctca taaaacttta gtgttgctcc tgggagttga
tccgtctcgg caacttgacc atcctctgcc aacagttcac
cctcaggtga cctatgccta catgaaaaac atgtggaaga
gtgcccgcaa gatcgatgcc ttccagcaca tgcagcattt
tgtccagacc atgcagcaac aggcccagca tgccatcgct
actgaggacc agcagcataa gcaggaactg cacaagctca
tggcccgatg cttcctgaaa cttggagagt ggcagctgaa
tctacagggc atcaatgaga gcacaatccc caaagtgctg
cagtactaca gcgccgccac agagcacgac cgcagctggt
acaaggcctg gcatgcgtgg gcagtgatga acttcgaagc
tgtgctacac tacaaacatc agaaccaagc ccgcgatgag
aagaagaaac tgcgtcatgc cagcggggcc aacatcacca
acgccaccac tgccgccacc acggccgcca ctgccaccac
cactgccagc accgagggca gcaacagtga gagcgaggcc
gagagcaccg agaacagccc caccccatcg ccgctgcaga
agaaggtcac tgaggatctg tccaaaaccc tcctgatgta
cacggtgcct gccgtccagg gcttcttccg ttccatctcc
ttgtcacgag gcaacaacct ccaggataca ctcagagttc
tcaccttatg gtttgattat ggtcactggc cagatgtcaa
tgaggcctta gtggaggggg tgaaagccat ccagattgat
acctggctac aggttatacc tcagctcatt gcaagaattg
atacgcccag acccttggtg ggacgtctca ttcaccagct
tctcacagac attggtcggt accaccccca ggccctcatc
tacccactga cagtggcttc taagtctacc acgacagccc
ggcacaatgc agccaacaag attctgaaga acatgtgtga
gcacagcaac accctggtcc agcaggccat gatggtgagc
gaggagctga tccgagtggc catcctctgg catgagatgt
ggcatgaagg cctggaagag gcatctcgtt tgtactttgg
ggaaaggaac gtgaaaggca tgtttgaggt gctggagccc
ttgcatgcta tgatggaacg gggcccccag actctgaagg
aaacatcctt taatcaggcc tatggtcgag atttaatgga
ggcccaagag tggtgcagga agtacatgaa atcagggaat
gtcaaggacc tcacccaagc ctgggacctc tattatcatg
tgttccgacg aatctcaaag cagctgcctc agctcacatc
cttagagctg caatatgttt ccccaaaact tctgatgtgc
cgggaccttg aattggctgt gccaggaaca tatgacccca
accagccaat cattcgcatt cagtccatag caccgtcttt
gcaagtcatc acatccaagc agaggccccg gaaattgaca
cttatgggca gcaacggaca tgagtttgtt ttccttctaa
aaggccatga agatctgcgc caggatgagc gtgtgatgca
gctcttcggc ctggttaaca cccttctggc caatgaccca
acatctcttc ggaaaaacct cagcatccag agatacgctg
tcatcccttt atcgaccaac tcgggcctca ttggctgggt
tccccactgt gacacactgc acgccctcat ccgggactac
agggagaaga agaagatcct tctcaacatc gagcatcgca
tcatgttgcg gatggctccg gactatgacc acttgactct
gatgcagaag gtggaggtgt ttgagcatgc cgtcaataat
acagctgggg acgacctggc caagctgctg tggctgaaaa
gccccagctc cgaggtgtgg tttgaccgaa gaaccaatta
tacccgttct ttagcggtca tgtcaatggt tgggtatatt
ttaggcctgg gagatagaca cccatccaac ctgatgctgg
accgtctgag tgggaagatc ctgcacattg actttgggga
ctgctttgag gttgctatga cccgagagaa gtttccagag
aagattccat ttagactaac aagaatgttg accaatgcta
tggaggttac aggcctggat ggcaactaca gaatcacatg
ccacacagtg atggaggtgc tgcgagagca caaggacagt
gtcatggccg tgctggaagc ctttgtctat gaccccttgc
tgaactggag gctgatggac acaaatacca aaggcaacaa
gcgatcccga acgaggacgg attcctactc tgctggccag
tcagtcgaaa ttttggacgg tgtggaactt ggagagccag
cccataagaa aacggggacc acagtgccag aatctattca
ttctttcatt ggagacggtt tggtgaaacc agaggcccta
aataagaaag ctatccagat tattaacagg gttcgagata
agctcactgg tcgggacttc tctcatgatg acactttgga
tgttccaacg caagttgagc tgctcatcaa acaagcgaca
tcccatgaaa acctctgcca gtgctatatt ggctggtgcc
ctttctggta a

[0349] Non-limiting examples of commercial ELISA assays that can be used to determine the expression level of SREBP1 are available from Novus Biologicals and Abcam. The protein and cDNA sequences for mature human SREBP1 are shown below.

Mature Human SREBP1 Protein
(SEQ ID NO: 67)
MDEPPFSEAALEQALGEPCDLDAALLTDIEDMLQLINNQDSDFPGLFDPP
YAGSGAGGTDPASPDTSSPGSLSPPPATLSSSLEAFLSGPQAAPSPLSPP
QPAPTPLKMYPSMPAFSPGPGIKEESVPLSILQTPTPQPLPGALLPQSFP
APAPPQFSSTPVLGYPSPPGGFSTGSPPGNTQQPLPGLPLASPPGVPPVS
LHTQVQSVVPQQLLTVTAAPTAAPVTTTVTSQIQQVPVLLQPHFIKADSL
LLTAMKTDGATVKAAGLSPLVSGTTVQTGPLPTLVSGGTILATVPLVVDA
EKLPINRLAAGSKAPASAQSRGEKRTAHNAIEKRYRSSINDKIIELKDLV
VGTEAKLNKSAVLRKAIDYIRFLQHSNQKLKQENLSLRTAVHKSKSLKDL
VSACGSGGNTDVLMEGVKTEVEDTLTPPPSDAGSPFQSSPLSLGSRGSGS
GGSGSDSEPDSPVFEDSKAKPEQRPSLHSRGMLDRSRLALCTLVFLCLSC
NPLASLLGARGLPSPSDTTSVYHSPGRNVLGTESRDGPGWAQWLLPPVVW
LLNGLLVLVSLVLLFVYGEPVTRPHSGPAVYFWRHRKQADLDLARGDFAQ
AAQQLWLALRALGRPLPTSHLDLACSLLWNLIRHLLQRLWVGRWLAGRAG
GLQQDCALRVDASASARDAALVYHKLHQLHTMGKHTGGHLTATNLALSAL
NLAECAGDAVSVATLAEIYVAAALRVKTSLPRALHFLTRFFLSSARQACL
AQSGSVPPAMQWLCHPVGHRFFVDGDWSVLSTPWESLYSLAGNPVDPLAQ
VTQLFREHLLERALNCVTQPNPSPGSADGDKEFSDALGYLQLLNSCSDAA
GAPAYSFSISSSMATTTGVDPVAKWWASLTAVVIHWLRRDEEAAERLCPL
VEHLPRVLQESERPLPRAALHSFKAARALLGCAKAESGPASLTICEKASG
YLQDSLATTPASSSIDKAVQLFLCDLLLVVRTSLWRQQQPPAPAPAAQGT
SSRPQASALELRGFQRDLSSLRRLAQSFRPAMRRVFLHEATARLMAGASP
TRTHQLLDRSLRRRAGPGGKGGAVAELEPRPTRREHAEALLLASCYLPPG
FLSAPGQRVGMLAEAARTLEKLGDRRLLHDCQQMLMRLGGGTTVTSS
Human SREBP1 cDNA
(SEQ ID NO: 68)
atggacgagccacccttcagcgaggcggctttggagcaggcgctgggcga
gccgtgcgatctggacgcggcgctgctgaccgacatcgaagacatgcttc
agcttatcaacaaccaagacagtgacttccctggcctatttgacccaccc
tatgctgggagtggggcagggggcacagaccctgccagccccgataccag
ctccccaggcagcttgtctccacctcctgccacattgagctcctctcttg
aagccttcctgagcgggccgcaggcagcgccctcacccctgtcccctccc
cagcctgcacccactccattgaagatgtacccgtccatgcccgctttctc
ccctgggcctggtatcaaggaagagtcagtgccactgagcatcctgcaga
cccccaccccacagcccctgccaggggccctcctgccacagagcttccca
gccccagccccaccgcagttcagctccacccctgtgttaggctaccccag
ccctccgggaggcttctctacaggaagccctcccgggaacacccagcagc
cgctgcctggcctgccactggcttccccgccaggggtcccgcccgtctcc
ttgcacacccaggtccagagtgtggtcccccagcagctactgacagtcac
agctgcccccacggcagcccctgtaacgaccactgtgacctcgcagatcc
agcaggtcccggtcctgctgcagccccacttcatcaaggcagactcgctg
cttctgacagccatgaagacagacggagccactgtgaaggcggcaggtct
cagtcccctggtctctggcaccactgtgcagacagggcctttgccgaccc
tggtgagtggcggaaccatcttggcaacagtcccactggtcgtagatgcg
gagaagctgcctatcaaccggctcgcagctggcagcaaggccccggcctc
tgcccagagccgtggagagaagcgcacagcccacaacgccattgagaagc
gctaccgctcctccatcaatgacaaaatcattgagctcaaggatctggtg
gtgggcactgaggcaaagctgaataaatctgctgtcttgcgcaaggccat
cgactacattcgctttctgcaacacagcaaccagaaactcaagcaggaga
acctaagtctgcgcactgctgtccacaaaagcaaatctctgaaggatctg
gtgtcggcctgtggcagtggagggaacacagacgtgctcatggagggcgt
gaagactgaggtggaggacacactgaccccacccccctcggatgctggct
cacctttccagagcagccccttgtcccttggcagcaggggcagtggcagc
ggtggcagtggcagtgactcggagcctgacagcccagtctttgaggacag
caaggcaaagccagagcagcggccgtctctgcacagccggggcatgctgg
accgctcccgcctggccctgtgcacgctcgtcttcctctgcctgtcctgc
aaccccttggcctccttgctgggggcccgggggcttcccagcccctcaga
taccaccagcgtctaccatagccctgggcgcaacgtgctgggcaccgaga
gcagagatggccctggctgggcccagtggctgctgcccccagtggtctgg
ctgctcaatgggctgttggtgctcgtctccttggtgcttctctttgtcta
cggtgagccagtcacacggccccactcaggccccgccgtgtacttctgga
ggcatcgcaagcaggctgacctggacctggcccggggagactttgcccag
gctgcccagcagctgtggctggccctgcgggcactgggccggcccctgcc
cacctcccacctggacctggcttgtagcctcctctggaacctcatccgtc
acctgctgcagcgtctctgggtgggccgctggctggcaggccgggcaggg
ggcctgcagcaggactgtgctctgcgagtggatgctagcgccagcgcccg
agacgcagccctggtctaccataagctgcaccagctgcacaccatgggga
agcacacaggcgggcacctcactgccaccaacctggcgctgagtgccctg
aacctggcagagtgtgcaggggatgccgtgtctgtggcgacgctggccga
gatctatgtggcggctgcattgagagtgaagaccagtctcccacgggcct
tgcattttctgacacgcttcttcctgagcagtgcccgccaggcctgcctg
gcacagagtggctcagtgcctcctgccatgcagtggctctgccaccccgt
gggccaccgtttcttcgtggatggggactggtccgtgctcagtaccccat
gggagagcctgtacagcttggccgggaacccagtggaccccctggcccag
gtgactcagctattccgggaacatctcttagagcgagcactgaactgtgt
gacccagcccaaccccagccctgggtcagctgatggggacaaggaattct
cggatgccctcgggtacctgcagctgctgaacagctgttctgatgctgcg
ggggctcctgcctacagcttctccatcagttccagcatggccaccaccac
cggcgtagacccggtggccaagtggtgggcctctctgacagctgtggtga
tccactggctgcggcgggatgaggaggcggctgagcggctgtgcccgctg
gtggagcacctgccccgggtgctgcaggagtctgagagacccctgcccag
ggcagctctgcactccttcaaggctgcccgggccctgctgggctgtgcca
aggcagagtctggtccagccagcctgaccatctgtgagaaggccagtggg
tacctgcaggacagcctggctaccacaccagccagcagctccattgacaa
ggccgtgcagctgttcctgtgtgacctgcttcttgtggtgcgcaccagcc
tgtggcggcagcagcagcccccggccccggccccagcagcccagggcacc
agcagcaggccccaggcttccgcccttgagctgcgtggcttccaacggga
cctgagcagcctgaggcggctggcacagagcttccggcccgccatgcgga
gggtgttcctacatgaggccacggcccggctgatggcgggggccagcccc
acacggacacaccagctcctcgaccgcagtctgaggcggcgggcaggccc
cggtggcaaaggaggcgcggtggcggagctggagccgcggcccacgcggc
gggagcacgcggaggccttgctgctggcctcctgctacctgccccccggc
ttcctgtcggcgcccgggcagcgcgtgggcatgctggctgaggcggcgcg
cacactcgagaagcttggcgatcgccggctgctgcacgactgtcagcaga
tgctcatgcgcctgggcggtgggaccactgtcacttccagctag

[0350] Non-limiting examples of commercial ELISA assays that can be used to determine the expression level of IFN-γ are available from R&D Systems, Thermo Fisher Scientific, Abcam, Enzo Life Sciences, and RayBiotech. The protein and cDNA sequences for mature human IFN-γ are shown below.

Mature Human IFN-γ
(SEQ ID NO: 69)
qdpyvke aenlkkyfna ghsdvadngt lflgilknwk
eesdrkimqs qivsfyfklf knfkddqsiq ksvetikedm
nvkffnsnkk krddfekltn ysvtdlnvqr kaiheliqvm
aelspaaktg krkrsqmlfr g
Human IFN-γ cDNA
(SEQ ID NO: 70)
caggac ccatatgtaa aagaagcaga aaaccttaag
aaatatttta atgcaggtca ttcagatgta gcggataatg
gaactctttt cttaggcatt ttgaagaatt ggaaagagga
gagtgacaga aaaataatgc agagccaaat tgtctccttt
tacttcaaac tttttaaaaa ctttaaagat gaccagagca
tccaaaagag tgtggagacc atcaaggaag acatgaatgt
caagtttttc aatagcaaca aaaagaaacg agatgacttc
gaaaagctga ctaattattc ggtaactgac ttgaatgtcc
aacgcaaagc aatacatgaa ctcatccaag tgatggctga
actgtcgcca gcagctaaaa cagggaagcg aaaaaggagt
cagatgctgt ttcgaggt

[0351] Non-limiting examples of commercial ELISA assays that can be used to determine the expression level of granzyme B are available from RayBiotech, Thermo Fisher Scientific, and R&D Systems. The protein and cDNA sequences for mature human granzyme B are shown below.

Mature Human Granzyme B
(SEQ ID NO: 71)
iiggheakph srpymaylmi wdqkslkrcg gflirddfvl
taahcwgssi nvtlgahnik eqeptqqfip vkrpiphpay
npknfsndim llqlerkakr travqplrlp snkaqvkpgq
tcsvagwgqt aplgkhshtl gevkmtvqed rkcesdlrhy
ydstielcvg dpeikktsfk gdsggplvcn kvaqgivsyg
rnngmpprac tkvssfvhwi kktmkry
Human Granzyme B cDNA
(SEQ ID NO: 72)
atcatcgggg gacatgaggc caagccccac tcccgcccct
acatggctta tcttatgatc tgggatcaga agtctctgaa
gaggtgcggt ggcttcctga tacgagacga cttcgtgctg
acagctgctc actgttgggg aagctccata aatgtcacct
tgggggccca caatatcaaa gaacaggagc cgacccagca
gtttatccct gtgaaaagac ccatccccca tccagcctat
aatcctaaga acttctccaa cgacatcatg ctactgcagc
tggagagaaa ggccaagcgg accagagctg tgcagcccct
caggctacct agcaacaagg cccaggtgaa gccagggcag
acatgcagtg tggccggctg ggggcagacg gcccccctgg
gaaaacactc acacacacta caagaggtga agatgacagt
gcaggaagat cgaaagtgcg aatctgactt acgccattat
tacgacagta ccattgagtt gtgcgtgggg gacccagaga
ttaaaaagac ttcctttaag ggggactctg gaggccctct
tgtgtgtaac aaggtggccc agggcattgt ctcctatgga
cgaaacaatg gcatgcctcc acgagcctgc accaaagtct
caagctttgt acactggata aagaaaacca tgaaacgcta
c

[0352] Non-limiting examples of commercial ELISA assays that can be used to determine the expression level of MYC are available from Invitrogen, LSBio, Biocodon Technologies, and Elisa Genie. The protein and cDNA sequences for mature human MYC are shown below.

Human Myc Protien
(SEQ ID NO: 329)
mdffrvvenq qppatmplnv sftnrnydld ydsvqpyfyc
deeenfyqqq qqselqppap sediwkkfel lptpplspsr
rsglcspsyv avtpfslrgd ndggggsfst adqlemvtel
lggdmvngsf icdpddetfi kniiiqdcmw sgfsaaaklv
seklasyqaa rkdsgspnpa rghsvcstss lylqdlsaaa
secidpsvvf pyplndsssp kscasqdssa fspssdslls
stesspqgsp eplvlheetp pttssdseee qedeeeidvv
svekrqapgk rsesgspsag ghskpphspl vlkrchvsth
qhnyaappst rkdypaakrv kldsvrvlrq isnnrkctsp
rssdteenvk rrthnvlerq rrnelkrsff alrdqipele
nnekapkvvi lkkatayils vqaeeqklis eedllrkrre
qlkhkleqlr nsca
Human Myc cDNA
(SEQ ID NO: 330)
ctggatt tttttcgggt agtggaaaac cagcagcctc
ccgcgacgat gcccctcaac gttagcttca ccaacaggaa
ctatgacctc gactacgact cggtgcagcc gtatttctac
tgcgacgagg aggagaactt ctaccagcag cagcagcaga
gcgagctgca gcccccggcg cccagcgagg atatctggaa
gaaattcgag ctgctgccca ccccgcccct gtcccctagc
cgccgctccg ggctctgctc gccctcctac gttgcggtca
cacccttctc ccttcgggga gacaacgacg gcggtggcgg
gagcttctcc acggccgacc agctggagat ggtgaccgag
ctgctgggag gagacatggt gaaccagagt ttcatctgcg
acccggacga cgagaccttc atcaaaaaca tcatcatcca
ggactgtatg tggagcggct tctcggccgc cgccaagctc
gtctcagaga agctggcctc ctaccaggct gcgcgcaaag
acagcggcag cccgaacccc gcccgcggcc acagcgtctg
ctccacctcc agcttgtacc tgcaggatct gagcgccgcc
gcctcagagt gcatcgaccc ctcggtggtc ttcccctacc
ctctcaacga cagcagctcg cccaagtcct gcgcctcgca
agactccagc gccttctctc cgtcctcgga ttctctgctc
tcctcgacgg agtcctcccc gcagggcagc cccgagcccc
tggtgctcca tgaggagaca ccgcccacca ccagcagcga
ctctgaggag gaacaagaag atgaggaaga aatcgatgtt
gtttctgtgg aaaagaggca ggctcctggc aaaaggtcag
agtctggatc accttctgct ggaggccaca gcaaacctcc
tcacagccca ctggtcctca agaggtgcca cgtctccaca
catcagcaca actacgcagc gcctccctcc actcggaagg
actatcctgc tgccaagagg gtcaagttgg acagtgtcag
agtcctgaga cagatcagca acaaccgaaa atgcaccagc
cccaggtcct cggacaccga ggagaatgtc aagaggcgaa
cacacaacgt cttggagcgc cagaggagga acgagctaaa
acggagcttt tttgccctgc gtgaccagat cccggagttg
gaaaacaatg aaaaggcccc caaggtagtt atccttaaaa
aagccacagc atacatcctg tccgtccaag cagaggagca
aaagctcatt tctgaagagg acttgttgcg gaaacgacga
gaacagttga aacacaaact tgaacagcta cggaactctt
gtgcgtaa

[0353] In some embodiments, activated NK cells (e.g., human activated NK cells) can show increased (e.g., at least a 10% increase, at least a 20% increase, at least a 30% increase, at least a 40% increase, at least a 50% increase, at least a 60% increase, at least a 70% increase, at least 80% increase, at least a 90% increase, at least a 100% increase, at least a 120% increase, at least a 140% increase, at least a 160% increase, at least a 180% increase, at least a 200% increase, at least a 220% increase, at least a 240% increase, at least a 260% increase, at least a 280% increase, or at least a 300% increase) ability to kill senescent cells (e.g., any of the senescent cells described herein) in a subject (e.g., any of the subjects described herein) or in vitro as compared to resting NK cells (e.g., human resting NK cells).

[0354] In some embodiments, activated NK cells (e.g., human activated NK cells) can show about a 10% increase to about a 500% increase (or any of the subranges of this range described herein) ability to kill senescent cells (e.g., any of the senescent cells described herein) in a subject (e.g., any of the subjects described herein) or in vivo as compared to resting NK cells (e.g., human resting NK cells).

[0355] In some embodiments, activated NK cells (e.g., human activated NK cells) can show increased (e.g., at least a 10% increase, at least a 20% increase, at least a 30% increase, at least a 40% increase, at least a 50% increase, at least a 60% increase, at least a 70% increase, at least 80% increase, at least a 90% increase, at least a 100% increase, at least a 120% increase, at least a 140% increase, at least a 160% increase, at least a 180% increase, at least a 200% increase, at least a 220% increase, at least a 240% increase, at least a 260% increase, at least a 280% increase, or at least a 300% increase) cytotoxic activity in a contact-cytotoxicity assay in the presence of an antibody that binds specifically to an antigen present on a senescent or target cell, e.g., as compared to a resting NK cell (e.g., human resting NK cells).

[0356] In some embodiments, activated NK cells (e.g., human activated NK cells) can show increased (e.g., about a 10% increase to about a 500% increase, or any of the subranges of this range described herein) cytotoxic activity in a contact-cytotoxicity assay in the presence of an antibody that binds specifically to an antigen present on a senescent or target cell, e.g., as compared to a resting NK cell (e.g., human resting NK cells).

[0357] In some embodiments, an activated NK cell can be produced by a method that includes obtaining a resting NK cell; and contacting the resting NK cell in vitro in a liquid culture medium including one or more NK cell activating agent(s), where the contacting results in the generation of the activated NK cells that are subsequently administered to the subject. In some examples of these methods, the resting NK cell is an autologous NK cell obtained from the subject. In some examples of these methods, the resting NK cell is an autologous NK cell obtained from the subject. In some examples of these methods, the resting NK cell is an haploidentical resting NK cells. In some examples of these methods, the resting NK cell is an allogeneic resting NK cell. In some examples of these methods, the resting NK cell is an artificial NK cell. In some examples of any of these methods, the resting NK cell is a genetically-engineered NK cell carrying a chimeric antigen receptor or recombinant T cell receptor.

[0358] In some examples of these methods, the liquid culture medium is a serum-free liquid culture medium. In some embodiments of any of the methods described herein, the liquid culture medium is a chemically-defined liquid culture medium. Some examples of these methods further include isolating the activated NK cells (and optionally further administering a therapeutically effective amount of the activated NK cells to a subject, e.g., any of the subjects described herein).

[0359] In some embodiments of these methods, the contacting step is performed for a period of about 2 hours to about 20 days (e.g., about 2 hours to about 18 days, about 2 hours to about 16 days, about 2 hours to about 14 days, about 2 hours to about 12 days, about 2 hours to about 10 days, about 2 hours to about 8 days, about 2 hours to about 7 days, about 2 hours to about 6 days, about 2 hours to about 5 days, about 2 hours to about 4 days, about 2 hours to about 3 days, about 2 hours to about 2 days, about 2 hours to about 1 day, about 6 hours to about 18 days, about 6 hours to about 16 days, about 6 hours to about 14 days, about 6 hours to about 12 days, about 6 hours to about 10 days, about 6 hours to about 8 days, about 6 hours to about 7 days, about 6 hours to about 6 days, about 6 hours to about 5 days, about 6 hours to about 4 days, about 6 hours to about 3 days, about 6 hours to about 2 days, about 6 hours to about 1 day, about 12 hours to about 18 days, about 12 hours to about 16 days, about 12 hours to about 14 days, about 12 hours to about 12 days, about 12 hours to about 10 days, about 12 hours to about 8 days, about 12 hours to about 7 days, about 12 hours to about 6 days, about 12 hours to about 5 days, about 12 hours to about 4 days, about 12 hours to about 3 days, about 12 hours to about 2 days, about 12 hours to about 1 day, about 1 day to about 18 days, about 1 day to about 16 days, about 1 day to about 15 days, about 1 day to about 14 days, about 1 day to about 12 days, about 1 day to about 10 days, about 1 day to about 8 days, about 1 day to about 7 days, about 1 day to about 6 days, about 1 day to about 5 days, about 1 day to about 4 days, about 1 day to about 3 days, about 1 day to about 2 days, about 2 days to about 18 days, about 2 days to about 16 days, about 2 days to about 14 days, about 2 days to about 12 days, about 2 days to about 10 days, about 2 days to about 8 days, about 2 days to about 7 days, about 2 days to about 6 days, about 2 days to about 5 days, about 2 days to about 4 days, about 2 days to about 3 days, about 3 days to about 18 days, about 3 days to about 16 days, about 3 days to about 14 days, about 3 days to about 12 days, about 3 days to about 10 days, about 3 days to about 8 days, about 3 days to about 7 days, about 3 days to about 6 days, about 3 days to about 5 days, about 3 days to about 4 days, about 4 days to about 18 days, about 4 days to about 16 days, about 4 days to about 14 days, about 4 days to about 12 days, about 4 days to about 10 days, about 4 days to about 8 days, about 4 days to about 7 days, about 4 days to about 6 days, about 4 days to about 5 days, about 5 days to about 18 days, about 5 days to about 16 days, about 5 days to about 14 days, about 5 days to about 12 days, about 5 days to about 10 days, about 5 days to about 8 days, about 5 days to about 7 days, about 5 days to about 6 days, about 6 days to about 18 days, about 6 days to about 16 days, about 6 days to about 14 days, about 6 days to about 12 days, about 6 days to about 10 days, about 6 days to about 8 days, about 6 days to about 7 days, about 7 days to about 18 days, about 7 days to about 16 days, about 7 days to about 14 days, about 7 days to about 12 days, about 7 days to about 10 days, about 7 days to about 8 days, about 8 days to about 18 days, about 8 days to about 16 days, about 8 days to about 14 days, about 8 days to about 12 days, about 8 days to about 10 days, about 9 days to about 18 days, about 9 days to about 16 days, about 9 days to about 14 days, about 9 days to about 12 days, about 12 days to about 18 days, about 12 days to about 16 days, about 12 days to about 14 days, about 14 days to about 18 days, about 14 days to about 16 days, or about 16 days to about 18 days.

### NK Cell Activating Agents

[0360] Provided herein are methods that include the use or administration of one or more NK cell activating agents. In some embodiments, an NK cell activating agent can be a protein. In some embodiments, an NK cell activating agent can be a single-chain chimeric polypeptide (e.g. any of the single-chain chimeric polypeptides described herein), a multi-chain chimeric polypeptide (e.g. any of the multi-chain chimeric polypeptides described herein, e.g., the exemplary type A and type B multi-chain chimeric polypeptides described herein), an antibody, a recombinant cytokine or an interleukin (e.g. any of the recombinant cytokines or interleukins described herein), and a soluble interleukin or cytokine receptor (e.g. any of the soluble interleukin or cytokine receptors described herein). In some embodiments, the NK cell activating agent can be a small molecule (e.g., a glycogen synthase kinase-3 (GSK3) inhibitor, e.g., CHIR99021 as described in Cichocki et al., Cancer Res. 77:5664-5675, 2017) or an aptamer.

[0361] In some embodiments of any of the one or more NK cell activating agents provided herein, at least one of the one or more NK cell activating agent(s) results in activation of one or more (e.g., two, three, four, five, six, seven, or eight) of: a receptor for IL-2, a receptor for IL-7, a receptor for IL-12, a receptor for IL-15, a receptor for IL-18, a receptor for IL-21, a receptor for IL-33, CD16, CD69, CD25, CD59, CD352, NKp80, DNAM-1, 2B4, NKp30, NKp44, NKp46, NKG2D, KIR2DS1, KIR2Ds2/3, KIR2DL4, KIR2DS4, KIR2DS5, and KIR3DS1 (e.g., in an immune cell, e.g., a human immune cell, e.g., a human NK cell) as compared to the level of activation in the absence of the one or more NK cell activating agent(s).

[0362] In some embodiments, the at least one of the one or more NK cell activating agent(s) that results in activation of a receptor for IL-2 is a soluble IL-2 or an agonistic antibody that binds specifically to an IL-2 receptor.

[0363] In some embodiments, the at least one of the one or more NK cell activating agent(s) that results in activation of a receptor for IL-7 is a soluble IL-7 or an agonistic antibody that binds specifically to an IL-7 receptor.

[0364] In some embodiments, the at least one of the one or more NK cell activating agent(s) that results in activation of a receptor for IL-12 is a soluble IL-12 or an agonistic antibody that binds specifically to an IL-12 receptor.

[0365] In some embodiments, the at least one of the one or more NK cell activating agent(s) that results in activation of a receptor for IL-15 is a soluble IL-15 or an agonistic antibody that binds specifically to an IL-15 receptor.

[0366] In some embodiments, the at least one of the one or more NK cell activating agent(s) that results in activation of a receptor for IL-21 is a soluble IL-21 or an agonistic antibody that binds specifically to an IL-21 receptor.

[0367] In some embodiments, the at least one of the one or more NK cell activating agent(s) that results in activation of a receptor for IL-33 is a soluble IL-33 or an agonistic antibody that binds specifically to an IL-33 receptor.

[0368] In some embodiments, the at least one of the one or more NK cell activating agent(s) that results in activation of CD16 is an agonistic antibody that binds specifically to CD16.

[0369] In some embodiments, the at least one of the one or more NK cell activating agent(s) that results in activation of CD69 is an agonistic antibody that binds specifically to CD69.

[0370] In some embodiments, the at least one of the one or more NK cell activating agent(s) that results in activation of CD25, CD59 is an agonistic antibody that binds specifically to CD25, CD59.

[0371] In some embodiments, the at least one of the one or more NK cell activating agent(s) that results in activation of CD352 is an agonistic antibody that binds specifically to CD352.

[0372] In some embodiments, the at least one of the one or more NK cell activating agent(s) that results in activation of NKp80 is an agonistic antibody that binds specifically to NKp80.

[0373] In some embodiments, the at least one of the one or more NK cell activating agent(s) that results in activation of DNAM-1 is an agonistic antibody that binds specifically to DNAM-1.

[0374] In some embodiments, the at least one of the one or more NK cell activating agent(s) that results in activation of 2B4 is an agonistic antibody that binds specifically to 2B4.

[0375] In some embodiments, the at least one of the one or more NK cell activating agent(s) that results in activation of NKp30 is an agonistic antibody that binds specifically to NKp30.

[0376] In some embodiments, the at least one of the one or more NK cell activating agent(s) that results in activation of NKp44 is an agonistic antibody that binds specifically to NKp44.

[0377] In some embodiments, the at least one of the one or more NK cell activating agent(s) that results in activation of NKp46 is an agonistic antibody that binds specifically to NKp46.

[0378] In some embodiments, the at least one of the one or more NK cell activating agent(s) that results in activation of NKG2D is an agonistic antibody that binds specifically to NKG2D.

[0379] In some embodiments, the at least one of the one or more NK cell activating agent(s) that results in activation of KIR2DS1 is an agonistic antibody that binds specifically to KIT2DS1.

[0380] In some embodiments, the at least one of the one or more NK cell activating agent(s) that results in activation of KIR2DS2/3 is an agonistic antibody that binds specifically to KIT2DS2/3.

[0381] In some embodiments, the at least one of the one or more NK cell activating agent(s) that results in activation of KIR2DL4 is an agonistic antibody that binds specifically to KIT2DL4.

[0382] In some embodiments, the at least one of the one or more NK cell activating agent(s) that results in activation of KIR2DS4 is an agonistic antibody that binds specifically to KIT2DS4.

[0383] In some embodiments, the at least one of the one or more NK cell activating agent(s) that results in activation of KIR2DS5 is an agonistic antibody that binds specifically to KIT2DS5.

[0384] In some embodiments, the at least one of the one or more NK cell activating agent(s) that results in activation of KIR3DS1 is an agonistic antibody that binds specifically to KIT3DS1.

[0385] In some embodiments of any of the one or more NK cell activating agents provided herein, at least one (e.g., two, three, four, or five) of the one or more NK cell activating agent(s) results in a decrease in the activation of one or more of: PD-1, a TGF-β receptor, TIGIT, CD1, TIM-3, Siglec-7, IRP60, Tactile, IL1R8, NKG2A/KLRD1, KIR2DL1, KIR2DL2/3, KIR2DL5, KIR3DL1, KIR3DL2, ILT2/LIR-1, and LAG-2 (e.g., in an immune cell, e.g., a human immune cell, e.g., a human NK cell) as compared to the level of activation in the absence of the one or more NK cell activating agent(s).

[0386] In some embodiments, the at least one of the one or more NK cell activating agent(s) that results in a decrease in the activation of a TGF-β receptor is a soluble TGF-β receptor, an antibody that binds specifically to TGF-β, or an antagonistic antibody that binds specifically to a TGF-β receptor.

[0387] In some embodiments, the at least one of the one or more NK cell activating agent(s) that results in a decrease in the activation of TIGIT is an antagonistic antibody that binds specifically to TIGIT, a soluble TIGIT, or an antibody that binds specifically to a ligand of TIGIT.

[0388] In some embodiments, the at least one of the one or more NK cell activating agent(s) that results in a decrease in the activation of CD1 is an antagonistic antibody that binds specifically to CD1, a soluble CD1, or an antibody that binds specifically to a ligand of CD1.

[0389] In some embodiments, the at least one of the one or more NK cell activating agent(s) that results in a decrease in the activation of TIM-3 is an antagonistic antibody that binds specifically to TIM-3, a soluble TIM-3, or an antibody that binds specifically to a ligand of TIM-3.

[0390] In some embodiments, the at least one of the one or more NK cell activating agent(s) that results in a decrease in the activation of Siglec-7 is an antagonistic antibody that binds specifically to Siglec-7, a soluble Siglec-7, or an antibody that binds specifically to a ligand of Siglec-7.

[0391] In some embodiments, the at least one of the one or more NK cell activating agent(s) that results in a decrease in the activation of IRP-60 is an antagonistic antibody that binds specifically to IRP-60, a soluble IRP-60, or an antibody that binds specifically to a ligand of IRP-60.

[0392] In some embodiments, the at least one of the one or more NK cell activating agent(s) that results in a decrease in the activation of Tactile is an antagonistic antibody that binds specifically to Tactile, a soluble Tactile, or an antibody that binds specifically to a ligand of Tactile.

[0393] In some embodiments, the at least one of the one or more NK cell activating agent(s) that results in a decrease in the activation of IL1R8 is an antagonistic antibody that binds specifically to IL1R8, a soluble IL1R8, or an antibody that binds specifically to a ligand of IL1R8.

[0394] In some embodiments, the at least one of the one or more NK cell activating agent(s) that results in a decrease in the activation of NKG2A/KLRD1 is an antagonistic antibody that binds specifically to NKG2A/KLRD1, a soluble NKG2A/KLRD1, or an antibody that binds specifically to a ligand of NKG2A/KLRD1.

[0395] In some embodiments, the at least one of the one or more NK cell activating agent(s) that results in a decrease in the activation of KIR2DL1 is an antagonistic antibody that binds specifically to KIR2DL1, a soluble KIR2DL1, or an antibody that binds specifically to a ligand of KIR2DL1.

[0396] In some embodiments, the at least one of the one or more NK cell activating agent(s) that results in a decrease in the activation of KIR2DL2/3 is an antagonistic antibody that binds specifically to KIR2DL2/3, a soluble KIR2DL2/3, or an antibody that binds specifically to a ligand of KIR2DL2/3.

[0397] In some embodiments, the at least one of the one or more NK cell activating agent(s) that results in a decrease in the activation of KIR2DL5 is an antagonistic antibody that binds specifically to KIR2DL5, a soluble KIR2DL5, or an antibody that binds specifically to a ligand of KIR2DL5.

[0398] In some embodiments, the at least one of the one or more NK cell activating agent(s) that results in a decrease in the activation of KIR3DL1 is an antagonistic antibody that binds specifically to KIR3DL1, a soluble KIR3DL1, or an antibody that binds specifically to a ligand of KIR3DL1.

[0399] In some embodiments, the at least one of the one or more NK cell activating agent(s) that results in a decrease in the activation of KIR3DL2 is an antagonistic antibody that binds specifically to KIR3DL2, a soluble KIR3DL2, or an antibody that binds specifically to a ligand of KIR3DL2.

[0400] In some embodiments, the at least one of the one or more NK cell activating agent(s) that results in a decrease in the activation of ILT2/LIR-1 is an antagonistic antibody that binds specifically to ILT2/LIR-1, a soluble ILT2/LIR-1, or an antibody that binds specifically to a ligand of ILT2/LIR-1.

[0401] In some embodiments, the at least one of the one or more NK cell activating agent(s) that results in a decrease in the activation of LAG2 is an antagonistic antibody that binds specifically to LAG2, a soluble LAG2, or an antibody that binds specifically to a ligand of LAG2.

[0402] Non-limiting examples of NK cell activating agents are described below and can be used in any combination.

[0403] In some examples, an NK cell activating agents can be a soluble PD-1, a soluble PD-L1, a soluble TIGIT, a soluble CD1, or a soluble TIM-3. Non-limiting examples of soluble PD-1, PD-L1, TIGIT, CD1, and TIM-3 are provided below.

Human Soluble PD-1
(SEQ ID NO: 73)
pgwfldspdr pwnpptfspa llvvtegdna tftcsfsnts
esfvlnwyrm spsnqtdkla afpedrsqpg qdcrfrvtql
pngrdfhmsv vrarrndsgt ylcgaislap kaqikeslra
elrvterrae vptahpspsp rpagqfqtlv vgvvggllgs
lvllvwvlav icsraargti garrtgqplk edpsavpvfs
vdygeldfqw rektpeppvp cvpeqteyat ivfpsgmgts
sparrgsadg prsaqplrpe dghcswpl
Human Soluble PD-L1
(SEQ ID NO: 74)
ftvtvpkdlyvv eygsnmtiec kfpvekqldl aalivyweme
dkniiqfvhg eedlkvqhss yrqrarllkd qlslgnaalq
itdvklqdag vyrcmisygg adykritvkv napynkinqr
ilvvdpvtse heltcqaegy pkaeviwtss dhqvlsgktt
ttnskreekl fnvtstlrin tttneifyct frrldpeenh
taelvipelp lahppnerth lvilgaillc lgvaltfifr
lrkgrmmdvk kcgiqdtnsk kqsdthleet
Human Soluble TIGIT
(SEQ ID NO: 75)
mmtgtiett gnisaekggs iilqchlsst taqvtqvnwe
qqdqllaicn adlgwhisps fkdrvapgpg lgltlqsltv
ndtgeyfciy htypdgtytg riflevless vaehgarfqi
pllgamaatl vvictavivv valtrkkkal rihsvegdlr
rksagqeews psapsppgsc vqaeaapagl cgeqrgedca
elhdyfnvls yrslgncsff tetg
Human Soluble CD1A
(SEQ ID NO: 76)
nadglkeplsfhvt wiasfynhsw kqnlvsgwls dlqthtwdsn
sstivflcpw srgnfsneew keletlfrir tirsfegirr
yahelqfeyp feiqvtggce lhsgkvsgsf lqlayqgsdf
vsfqnnswlp ypvagnmakh fckvlnqnqh endithnlls
dtcprfilgl ldagkahlqr qvkpeawlsh gpspgpghlq
lvchvsgfyp kpvwvmwmrg eqeqqgtqrg dilpsadgtw
ylratlevaa geaadlscrv khsslegqdi vlywehhssv
gfiilavivp lllliglalw frkrcfc
Human Soluble TIM3
(SEQ ID NO: 77)
seveyraev gqnaylpcfy tpaapgnlvp vcwgkgacpv
fecgnvvlrt derdvnywts rywlngdfrk gdvsltienv
tladsgiycc riqipgimnd ekfnlklvik pakvtpaptr
qrdftaafpr mlttrghgpa etqtlgslpd inltqistla
nelrdsrlan dlrdsgatir igiyigagic aglalalifg
alifkwyshs kekiqnlsli slanlppsgl anavaegirs
eeniytieen vyeveepney ycyvssrqqp sqplgcrfam

[0404] In some embodiments, a soluble PD-1 protein can include a sequence that is at least 80% identical, at least 82% identical, at least 84% identical, at least 86% identical, at least 88% identical, at least 90% identical, at least 92% identical, at least 94% identical, at least 96% identical, at least 98% identical, at least 99% identical, or 100% identical to SEQ ID NO: 73.

[0405] In some embodiments, a soluble PD-L1 protein can include a sequence that is at least 80% identical, at least 82% identical, at least 84% identical, at least 86% identical, at least 88% identical, at least 90% identical, at least 92% identical, at least 94% identical, at least 96% identical, at least 98% identical, at least 99% identical, or 100% identical to SEQ ID NO: 74.

[0406] In some embodiments, a soluble TIGIT protein can include a sequence that is at least 80% identical, at least 82% identical, at least 84% identical, at least 86% identical, at least 88% identical, at least 90% identical, at least 92% identical, at least 94% identical, at least 96% identical, at least 98% identical, at least 99% identical, or 100% identical to SEQ ID NO: 75.

[0407] In some embodiments, a soluble CD1A protein can include a sequence that is at least 80% identical, at least 82% identical, at least 84% identical, at least 86% identical, at least 88% identical, at least 90% identical, at least 92% identical, at least 94% identical, at least 96% identical, at least 98% identical, at least 99% identical, or 100% identical to SEQ ID NO: 76.

[0408] In some embodiments, a soluble TIM3 protein can include a sequence that is at least 80% identical, at least 82% identical, at least 84% identical, at least 86% identical, at least 88% identical, at least 90% identical, at least 92% identical, at least 94% identical, at least 96% identical, at least 98% identical, at least 99% identical, or 100% identical to SEQ ID NO: 77.

### Recombinant Antibodies

[0409] In some examples, NK activating agent can be: an agonistic antibody that binds specifically to an IL-2 receptor (see, e.g., those described in Gaulton et al., Clinical Immunology and Immunopathology 36(1):18-29, 1985), an agonistic antibody that binds specifically to an IL-7 receptor, an agonistic antibody that binds specifically to IL-12 receptor (see, e.g., those described in Rogge et al., J. Immunol. 162(7): 3926-3932, 1999), an agonistic antibody that binds specifically to IL-15 receptor, an agonistic antibody that binds specifically to IL-21 receptor (see, e.g., those described in U.S. Patent Application Publication No. 2006/159655), an agonistic antibody that binds specifically to IL-33 receptor (see, e.g., those described in U.S. Patent Application Publication No. 2007/160579), an antagonistic antibody that binds specifically to PD-1 (see, e.g., those described in U.S. Pat. No. 7,521,051), an antibody that binds specifically to PD-L1 (see, e.g., those described in U.S. Pat. No. 8,217,149), an antibody that binds specifically to TGF-β, an antagonistic antibody that binds specifically to TGF-β receptor (see, e.g., those described in European Patent Application Publication No. 1245676 A1), an antagonistic antibody that binds specifically to TIGIT (see, e.g., those described in WO 2017/053748), an antibody that binds specifically to a ligand of TIGIT (see, e.g., those described in WO 2011/127324), an antagonistic antibody that binds specifically to CD1 (see, e.g., those described in Szalay et al., J. Immunol. 162(12):6955-6958, 1999), an antibody that binds specifically to a ligand of CD1 (see, e.g., those described in Kain et al., Immunity 41(4):543-554, 2014), an antagonistic antibody that binds specifically to TIM-3 (see, e.g., those described in U.S. Patent Application Publication No. 2015/218274), an antibody that binds specifically to a ligand of TIM-3 (see, e.g., those described in U.S. Patent Application Publication No. 2017/283499), an agonistic antibody that binds specifically to CD69 (see, e.g., those described in Moretta et al., Journal of Experimental Medicine 174:1393, 1991), an agonistic antibody that binds specifically to CD25, CD59, an agonistic antibody that binds specifically to CD352 (see, e.g., those described in Yigit et al., Oncotarget 7:26346-26360, 2016), an agonistic antibody that binds specifically to NKp80 (see, e.g., those described in Peipp et al., Oncotarget 6:32075-32088, 2015), an agonistic antibody that binds specifically to DNAM-1, an agonistic antibody that binds specifically to 2B4 (see, e.g., those described in Sandusky et al., European J. Immunol. 36:3268-3276, 2006), an agonistic antibody that binds specifically to NKp30 (see, e.g., those described in Kellner et al., OncoImmunology 5:1-12, 2016), an agonistic antibody that binds specifically to NKp44, an agonistic antibody that binds specifically to NKp46 (see, e.g., those described in Xiong et al., J. Clin. Invest. 123:4264-4272, 2013), an agonistic antibody that binds specifically to NKG2D (see, e.g., those described in Kellner et al., OncoImmunology 5:1-12, 2016), an agonistic antibody that binds specifically to KIR2DS1 (see, e.g., those described in Xiong et al., J. Clin. Invest. 123:4264-4272, 2013), an agonistic antibody that binds specifically to KIR2Ds2/3 (see, e.g., those described in Borgerding et al., Exp. Hematology 38:213-221, 2010), an agonistic antibody that binds specifically to KIR2DL4 (see, e.g., those described in Miah et al., J. Immunol. 180:2922-32, 2008), an agonistic antibody that binds specifically to KIR2DS4 (see, e.g., those described in Czaja et al., Genes and Immunity 15:33-37, 2014), an agonistic antibody that binds specifically to KIR2DS5 (see, e.g., those described in Czaja et al., Genes and Immunity 15:33-37, 2014), an agonistic antibody that binds specifically to KIR3DS1 (see, e.g., those described in Czaja et al., Genes and Immunity 15:33-37, 2014), an antagonistic antibody that binds specifically to Siglec-7 (see, e.g., those described in Hudak et al., Nature Chemical Biology 10:69-75, 2014), an antagonistic antibody that binds specifically to IRP60 (see, e.g., those described in Bachelet et al., J. Biol. Chem. 281:27190-27196, 2006), an antagonistic antibody that binds specifically to Tactile (see, e.g., those described in Brooks et al., Eur. J. Cancer 61(Suppl. 1):S189, 2016), an antagonistic antibody that binds specifically to IL1R8 (see, e.g., those described in Molgora et al., Frontiers Immunol. 7:1, 2016), an antagonistic antibody that binds specifically to NKG2A/KLRD1 (see, e.g., those described in Kim et al., Infection Immunity 76:5873-5882, 2008), an antagonistic antibody that binds specifically to KIR2DL1 (see, e.g., those described in Weiner et al., Cell 148:1081-1084, 2012), an antagonistic antibody that binds specifically to KIR2DL2/3 (see, e.g., those described in Weiner et al., Cell 148:1081-1084, 2012), an antagonistic antibody that binds specifically to KIR2DL5 (see, e.g., those described in U.S. Pat. No. 9,067,997), and an antagonistic antibody that binds specifically KIR3DL1 (see, e.g., those described in U.S. Pat. No. 9,067,997), an antagonistic antibody that binds specifically to KIR3DL2 (see, e.g., those described in U.S. Pat. No. 9,067,997), an antagonistic antibody that binds specifically to ILT2/LIR-1 (see, e.g., those described in U.S. Pat. No. 8,133,485), and an antagonistic antibody that binds specifically to LAG-2.

[0410] A recombinant antibody that is an NK cell activating agent can be any of exemplary types of antibodies (e.g., a human or humanized antibody) or any of the exemplary antibody fragments described herein. A recombinant antibody that is an NK cell activating agent can include, e.g., any of the antigen-binding domains described herein.

### Recombinant Interleukins or Cytokines

[0411] In some examples, NK activating agents can be, e.g., a soluble IL-2, a soluble IL-7, a soluble IL-12, a soluble IL-15, a soluble IL-21, and a soluble IL-33. Non-limiting examples of soluble IL-12, IL-15, IL-21, and IL-33. are provided below.

Human Soluble IL-2
(SEQ ID NO: 78)
aptssstkkt qlqlehllld lqmilnginn yknpkltrml
tfkfympkka telkhlqcle eelkpleevl nlaqsknfhl
rprdlisnin vivlelkgse ttfmceyade tativeflnr
witfcgsiis tlt
Human Soluble IL-7
(SEQ ID NO: 79)
dcdiegkdgkqyesv lmvsidqlld smkeigsncl
nnefnffkrh icdankegmf lfraarklrq flkmnstgdf
dlhllkvseg ttillnctgq vkgrkpaalg eaqptkslee
nkslkeqkkl ndlcflkrll qeiktcwnki lmgtkeh
Human Soluble IL-12 subunit alpha
(SEQ ID NO: 80)
rnlpvatp dpgmfpclhh sqnllravsn mlqkarqtle
fypctseeid heditkdkts tveaclplel tknesclnsr
etsfitngsc lasrktsfmm alclssiyed lkmyqvefkt
mnakllmdpk rqifldqnml avidelmqal nfnsetvpqk
ssleepdfyk tkiklcillh afriravtid rvmsylnas
Human Soluble IL-12 subunit beta
(SEQ ID NO: 81)
iwelkkdv yvveldwypd apgemvvltc dtpeedgitw
tldqssevlg sgktltiqvk efgdagqytc hkggevlshs
llllhkkedg iwstdilkdq kepknktflr ceaknysgrf
tcwwlttist dltfsvkssr gssdpqgvtc gaatlsaerv
rgdnkeyeys vecqedsacp aaeeslpiev mvdavhklky
enytssffir diikpdppkn lqlkplknsr qvevsweypd
twstphsyfs ltfcvqvqgk skrekkdrvf tdktsatvic
rknasisvra qdryysssws ewasvpcs
Human Soluble IL-15
(SEQ ID NO: 82)
Nwvnvisdlkki edliqsmhid atlytesdvh psckvtamkc
fllelqvisl esgdasihdt venliilann slssngnvte
sgckeceele eknikeflqs fvhivqmfin ts
Human Soluble IL-21
(SEQ ID NO: 83)
qgqdrhmi rmrqlidivd qlknyvndlv peflpapedv
etncewsafs cfqkaqlksa ntgnneriin vsikklkrkp
pstnagrrqk hrltcpscds yekkppkefl erfksllqkm
ihqhlssrth gseds
Human Soluble IL-33
(SEQ ID NO: 84)
mkpkmkystn kistakwknt askalcfklg ksqqkakevc
pmyfmklrsg lmikkeacyf rrettkrpsl ktgrkhkrhl
vlaacqqqst vecfafgisg vqkytralhd ssitgispit
eylaslstyn dqsitfaled esyeiyvedl kkdekkdkvl
lsyyesqhps nesgdgvdgk mlmvtlsptk dfwlhannke
hsvelhkcek plpdqaffvl hnmhsncvsf ecktdpgvfi
gvkdnhlali kvdssenlct enilfklset

[0412] In some embodiments, a soluble IL-2 protein can include a sequence that is at least 80% identical, at least 82% identical, at least 84% identical, at least 86% identical, at least 88% identical, at least 90% identical, at least 92% identical, at least 94% identical, at least 96% identical, at least 98% identical, at least 99% identical, or 100% identical to SEQ ID NO: 78.

[0413] In some embodiments, a soluble IL-7 protein can include a sequence that is at least 80% identical, at least 82% identical, at least 84% identical, at least 86% identical, at least 88% identical, at least 90% identical, at least 92% identical, at least 94% identical, at least 96% identical, at least 98% identical, at least 99% identical, or 100% identical to SEQ ID NO: 79.

[0414] In some embodiments, a soluble IL-2 protein includes a sequence that is at least 80% identical, at least 82% identical, at least 84% identical, at least 86% identical, at least 88% identical, at least 90% identical, at least 92% identical, at least 94% identical, at least 96% identical, at least 98% identical, at least 99% identical, or 100% identical to SEQ ID NO: 80 and a sequence that is at least 80% identical, at least 82% identical, at least 84% identical, at least 86% identical, at least 88% identical, at least 90% identical, at least 92% identical, at least 94% identical, at least 96% identical, at least 98% identical, at least 99% identical, or 100% identical to SEQ ID NO: 81.

[0415] In some embodiments, a soluble IL-15 protein can include a sequence that is at least 80% identical, at least 82% identical, at least 84% identical, at least 86% identical, at least 88% identical, at least 90% identical, at least 92% identical, at least 94% identical, at least 96% identical, at least 98% identical, at least 99% identical, or 100% identical to SEQ ID NO: 82.

[0416] In some embodiments, a soluble IL-21 protein can include a sequence that is at least 80% identical, at least 82% identical, at least 84% identical, at least 86% identical, at least 88% identical, at least 90% identical, at least 92% identical, at least 94% identical, at least 96% identical, at least 98% identical, at least 99% identical, or 100% identical to SEQ ID NO: 83.

[0417] In some embodiments, a soluble IL-33 protein can include a sequence that is at least 80% identical, at least 82% identical, at least 84% identical, at least 86% identical, at least 88% identical, at least 90% identical, at least 92% identical, at least 94% identical, at least 96% identical, at least 98% identical, at least 99% identical, or 100% identical to SEQ ID NO: 84.

### Soluble Cytokine or Interleukin Receptors

[0418] In some examples of any of the soluble cytokine or interleukin receptors described herein, the soluble cytokine or interleukin receptors can be a soluble TGF-β receptor. In some examples, the soluble TGF-β receptor is a soluble TGF-β receptor I (TGF-βRI) (see, e.g., those described in Docagne et al., Journal of Biological Chemistry 276(49):46243-46250, 2001), a soluble TGF-β receptor II (TGF-βRII) (see, e.g., those described in Yung et al., Am. J. Resp. Crit. Care Med. 194(9):1140-1151, 2016), a soluble TGF-βRIII (see, e.g., those described in Heng et al., Placenta 57:320, 2017). In some examples, the soluble TGF-β receptor is a receptor “trap” for TGF-β (see, e.g., those described in Zwaagstra et al., Mol. Cancer Ther. 11(7):1477-1487, 2012, and those described in De Crescenzo et al. Transforming Growth Factor-β in Cancer Therapy, Volume II, pp 671-684).

[0419] Additional examples of soluble cytokine or soluble interleukin receptors are known in the art.

### Single Chain Chimeric Polypeptides

[0420] Non-limiting examples of NK cell activating agents are single-chain chimeric polypeptides that include: (i) a first target-binding domain (e.g., any of the target-binding domains described herein or known in the art), (ii) a soluble tissue factor domain (e.g., any of the exemplary soluble tissue factor domains described herein or known in the art), and (iii) as second target-binding domain (e.g., any of the target-binding domains described herein or known in the art).

[0421] In some examples of any of the single-chain chimeric polypeptides described herein, the single-chain chimeric polypeptide can have a total length of about 50 amino acids to about 3000 amino acids, about 50 amino acids to about 2500 amino acids, about 50 amino acids to about 2000 amino acids, about 50 amino acids to about 1500 amino acids, about 50 amino acids to about 1000 amino acids, about 50 amino acids to about 950 amino acids, about 50 amino acids to about 900 amino acids, about 50 amino acids to about 850 amino acids, about 50 amino acids to about 800 amino acids, about 50 amino acids to about 750 amino acids, about 50 amino acids to about 700 amino acids, about 50 amino acids to about 650 amino acids, about 50 amino acids to about 600 amino acids, about 50 amino acids to about 550 amino acids, about 50 amino acids to about 500 amino acids, about 50 amino acids to about 480 amino acids, about 50 amino acids to about 460 amino acids, about 50 amino acids to about 440 amino acids, about 50 amino acids to about 420 amino acids, about 50 amino acids to about 400 amino acids, about 50 amino acids to about 380 amino acids, about 50 amino acids to about 360 amino acids, about 50 amino acids to about 340 amino acids, about 50 amino acids to about 320 amino acids, about 50 amino acids to about 300 amino acids, about 50 amino acids to about 280 amino acids, about 50 amino acids to about 260 amino acids, about 50 amino acids to about 240 amino acids, about 50 amino acids to about 220 amino acids, about 50 amino acids to about 200 amino acids, about 50 amino acids to about 150 amino acids, about 50 amino acids to about 100 amino acids, about 100 amino acids to about 3000 amino acids, about 100 amino acids to about 2500 amino acids, about 100 amino acids to about 2000 amino acids, about 100 amino acids to about 1500 amino acids, about 100 amino acids to about 1000 amino acids, about 100 amino acids to about 950 amino acids, about 100 amino acids to about 900 amino acids, about 100 amino acids to about 850 amino acids, about 100 amino acids to about 800 amino acids, about 100 amino acids to about 750 amino acids, about 100 amino acids to about 700 amino acids, about 100 amino acids to about 650 amino acids, about 100 amino acids to about 600 amino acids, about 100 amino acids to about 550 amino acids, about 100 amino acids to about 500 amino acids, about 100 amino acids to about 480 amino acids, about 100 amino acids to about 460 amino acids, about 100 amino acids to about 440 amino acids, about 100 amino acids to about 420 amino acids, about 100 amino acids to about 400 amino acids, about 100 amino acids to about 380 amino acids, about 100 amino acids to about 360 amino acids, about 100 amino acids to about 340 amino acids, about 100 amino acids to about 320 amino acids, about 100 amino acids to about 300 amino acids, about 100 amino acids to about 280 amino acids, about 100 amino acids to about 260 amino acids, about 100 amino acids to about 240 amino acids, about 100 amino acids to about 220 amino acids, about 100 amino acids to about 200 amino acids, about 100 amino acids to about 150 amino acids, about 150 amino acids to about 3000 amino acids, about 150 amino acids to about 2500 amino acids, about 150 amino acids to about 2000 amino acids, about 150 amino acids to about 1500 amino acids, about 150 amino acids to about 1000 amino acids, about 150 amino acids to about 950 amino acids, about 150 amino acids to about 900 amino acids, about 150 amino acids to about 850 amino acids, about 150 amino acids to about 800 amino acids, about 150 amino acids to about 750 amino acids, about 150 amino acids to about 700 amino acids, about 150 amino acids to about 650 amino acids, about 150 amino acids to about 600 amino acids, about 150 amino acids to about 550 amino acids, about 150 amino acids to about 500 amino acids, about 150 amino acids to about 480 amino acids, about 150 amino acids to about 460 amino acids, about 150 amino acids to about 440 amino acids, about 150 amino acids to about 420 amino acids, about 150 amino acids to about 400 amino acids, about 150 amino acids to about 380 amino acids, about 150 amino acids to about 360 amino acids, about 150 amino acids to about 340 amino acids, about 150 amino acids to about 320 amino acids, about 150 amino acids to about 300 amino acids, about 150 amino acids to about 280 amino acids, about 150 amino acids to about 260 amino acids, about 150 amino acids to about 240 amino acids, about 150 amino acids to about 220 amino acids, about 150 amino acids to about 200 amino acids, about 200 amino acids to about 3000 amino acids, about 200 amino acids to about 2500 amino acids, about 200 amino acids to about 2000 amino acids, about 200 amino acids to about 1500 amino acids, about 200 amino acids to about 1000 amino acids, about 200 amino acids to about 950 amino acids, about 200 amino acids to about 900 amino acids, about 200 amino acids to about 850 amino acids, about 200 amino acids to about 800 amino acids, about 200 amino acids to about 750 amino acids, about 200 amino acids to about 700 amino acids, about 200 amino acids to about 650 amino acids, about 200 amino acids to about 600 amino acids, about 200 amino acids to about 550 amino acids, about 200 amino acids to about 500 amino acids, about 200 amino acids to about 480 amino acids, about 200 amino acids to about 460 amino acids, about 200 amino acids to about 440 amino acids, about 200 amino acids to about 420 amino acids, about 200 amino acids to about 400 amino acids, about 200 amino acids to about 380 amino acids, about 200 amino acids to about 360 amino acids, about 200 amino acids to about 340 amino acids, about 200 amino acids to about 320 amino acids, about 200 amino acids to about 300 amino acids, about 200 amino acids to about 280 amino acids, about 200 amino acids to about 260 amino acids, about 200 amino acids to about 240 amino acids, about 200 amino acids to about 220 amino acids, about 220 amino acids to about 3000 amino acids, about 220 amino acids to about 2500 amino acids, about 220 amino acids to about 2000 amino acids, about 220 amino acids to about 1500 amino acids, about 220 amino acids to about 1000 amino acids, about 220 amino acids to about 950 amino acids, about 220 amino acids to about 900 amino acids, about 220 amino acids to about 850 amino acids, about 220 amino acids to about 800 amino acids, about 220 amino acids to about 750 amino acids, about 220 amino acids to about 700 amino acids, about 220 amino acids to about 650 amino acids, about 220 amino acids to about 600 amino acids, about 220 amino acids to about 550 amino acids, about 220 amino acids to about 500 amino acids, about 220 amino acids to about 480 amino acids, about 220 amino acids to about 460 amino acids, about 220 amino acids to about 440 amino acids, about 220 amino acids to about 420 amino acids, about 220 amino acids to about 400 amino acids, about 220 amino acids to about 380 amino acids, about 220 amino acids to about 360 amino acids, about 220 amino acids to about 340 amino acids, about 220 amino acids to about 320 amino acids, about 220 amino acids to about 300 amino acids, about 220 amino acids to about 280 amino acids, about 220 amino acids to about 260 amino acids, about 220 amino acids to about 240 amino acids, about 240 amino acids to about 3000 amino acids, about 240 amino acids to about 2500 amino acids, about 240 amino acids to about 2000 amino acids, about 240 amino acids to about 1500 amino acids, about 240 amino acids to about 1000 amino acids, about 240 amino acids to about 950 amino acids, about 240 amino acids to about 900 amino acids, about 240 amino acids to about 850 amino acids, about 240 amino acids to about 800 amino acids, about 240 amino acids to about 750 amino acids, about 240 amino acids to about 700 amino acids, about 240 amino acids to about 650 amino acids, about 240 amino acids to about 600 amino acids, about 240 amino acids to about 550 amino acids, about 240 amino acids to about 500 amino acids, about 240 amino acids to about 480 amino acids, about 240 amino acids to about 460 amino acids, about 240 amino acids to about 440 amino acids, about 240 amino acids to about 420 amino acids, about 240 amino acids to about 400 amino acids, about 240 amino acids to about 380 amino acids, about 240 amino acids to about 360 amino acids, about 240 amino acids to about 340 amino acids, about 240 amino acids to about 320 amino acids, about 240 amino acids to about 300 amino acids, about 240 amino acids to about 280 amino acids, about 240 amino acids to about 260 amino acids, about 260 amino acids to about 3000 amino acids, about 260 amino acids to about 2500 amino acids, about 260 amino acids to about 2000 amino acids, about 260 amino acids to about 1500 amino acids, about 260 amino acids to about 1000 amino acids, about 260 amino acids to about 950 amino acids, about 260 amino acids to about 900 amino acids, about 260 amino acids to about 850 amino acids, about 260 amino acids to about 800 amino acids, about 260 amino acids to about 750 amino acids, about 260 amino acids to about 700 amino acids, about 260 amino acids to about 650 amino acids, about 260 amino acids to about 600 amino acids, about 260 amino acids to about 550 amino acids, about 260 amino acids to about 500 amino acids, about 260 amino acids to about 480 amino acids, about 260 amino acids to about 460 amino acids, about 260 amino acids to about 440 amino acids, about 260 amino acids to about 420 amino acids, about 260 amino acids to about 400 amino acids, about 260 amino acids to about 380 amino acids, about 260 amino acids to about 360 amino acids, about 260 amino acids to about 340 amino acids, about 260 amino acids to about 320 amino acids, about 260 amino acids to about 300 amino acids, about 260 amino acids to about 280 amino acids, about 280 amino acids to about 3000 amino acids, about 280 amino acids to about 2500 amino acids, about 280 amino acids to about 2000 amino acids, about 280 amino acids to about 1500 amino acids, about 280 amino acids to about 1000 amino acids, about 280 amino acids to about 950 amino acids, about 280 amino acids to about 900 amino acids, about 280 amino acids to about 850 amino acids, about 280 amino acids to about 800 amino acids, about 280 amino acids to about 750 amino acids, about 280 amino acids to about 700 amino acids, about 280 amino acids to about 650 amino acids, about 280 amino acids to about 600 amino acids, about 280 amino acids to about 550 amino acids, about 280 amino acids to about 500 amino acids, about 280 amino acids to about 480 amino acids, about 280 amino acids to about 460 amino acids, about 280 amino acids to about 440 amino acids, about 280 amino acids to about 420 amino acids, about 280 amino acids to about 400 amino acids, about 280 amino acids to about 380 amino acids, about 280 amino acids to about 360 amino acids, about 280 amino acids to about 340 amino acids, about 280 amino acids to about 320 amino acids, about 280 amino acids to about 300 amino acids, about 300 amino acids to about 3000 amino acids, about 300 amino acids to about 2500 amino acids, about 300 amino acids to about 2000 amino acids, about 300 amino acids to about 1500 amino acids, about 300 amino acids to about 1000 amino acids, about 300 amino acids to about 950 amino acids, about 300 amino acids to about 900 amino acids, about 300 amino acids to about 850 amino acids, about 300 amino acids to about 800 amino acids, about 300 amino acids to about 750 amino acids, about 300 amino acids to about 700 amino acids, about 300 amino acids to about 650 amino acids, about 300 amino acids to about 600 amino acids, about 300 amino acids to about 550 amino acids, about 300 amino acids to about 500 amino acids, about 300 amino acids to about 480 amino acids, about 300 amino acids to about 460 amino acids, about 300 amino acids to about 440 amino acids, about 300 amino acids to about 420 amino acids, about 300 amino acids to about 400 amino acids, about 300 amino acids to about 380 amino acids, about 300 amino acids to about 360 amino acids, about 300 amino acids to about 340 amino acids, about 300 amino acids to about 320 amino acids, about 320 amino acids to about 3000 amino acids, about 320 amino acids to about 2500 amino acids, about 320 amino acids to about 2000 amino acids, about 320 amino acids to about 1500 amino acids, about 320 amino acids to about 1000 amino acids, about 320 amino acids to about 950 amino acids, about 320 amino acids to about 900 amino acids, about 320 amino acids to about 850 amino acids, about 320 amino acids to about 800 amino acids, about 320 amino acids to about 750 amino acids, about 320 amino acids to about 700 amino acids, about 320 amino acids to about 650 amino acids, about 320 amino acids to about 600 amino acids, about 320 amino acids to about 550 amino acids, about 320 amino acids to about 500 amino acids, about 320 amino acids to about 480 amino acids, about 320 amino acids to about 460 amino acids, about 320 amino acids to about 440 amino acids, about 320 amino acids to about 420 amino acids, about 320 amino acids to about 400 amino acids, about 320 amino acids to about 380 amino acids, about 320 amino acids to about 360 amino acids, about 320 amino acids to about 340 amino acids, about 340 amino acids to about 3000 amino acids, about 340 amino acids to about 2500 amino acids, about 340 amino acids to about 2000 amino acids, about 340 amino acids to about 1500 amino acids, about 340 amino acids to about 1000 amino acids, about 340 amino acids to about 950 amino acids, about 340 amino acids to about 900 amino acids, about 340 amino acids to about 850 amino acids, about 340 amino acids to about 800 amino acids, about 340 amino acids to about 750 amino acids, about 340 amino acids to about 700 amino acids, about 340 amino acids to about 650 amino acids, about 340 amino acids to about 600 amino acids, about 340 amino acids to about 550 amino acids, about 340 amino acids to about 500 amino acids, about 340 amino acids to about 480 amino acids, about 340 amino acids to about 460 amino acids, about 340 amino acids to about 440 amino acids, about 340 amino acids to about 420 amino acids, about 340 amino acids to about 400 amino acids, about 340 amino acids to about 380 amino acids, about 340 amino acids to about 360 amino acids, about 360 amino acids to about 3000 amino acids, about 360 amino acids to about 2500 amino acids, about 360 amino acids to about 2000 amino acids, about 360 amino acids to about 1500 amino acids, about 360 amino acids to about 1000 amino acids, about 360 amino acids to about 950 amino acids, about 360 amino acids to about 900 amino acids, about 360 amino acids to about 850 amino acids, about 360 amino acids to about 800 amino acids, about 360 amino acids to about 750 amino acids, about 360 amino acids to about 700 amino acids, about 360 amino acids to about 650 amino acids, about 360 amino acids to about 600 amino acids, about 360 amino acids to about 550 amino acids, about 360 amino acids to about 500 amino acids, about 360 amino acids to about 480 amino acids, about 360 amino acids to about 460 amino acids, about 360 amino acids to about 440 amino acids, about 360 amino acids to about 420 amino acids, about 360 amino acids to about 400 amino acids, about 360 amino acids to about 380 amino acids, about 380 amino acids to about 3000 amino acids, about 380 amino acids to about 2500 amino acids, about 380 amino acids to about 2000 amino acids, about 380 amino acids to about 1500 amino acids, about 380 amino acids to about 1000 amino acids, about 380 amino acids to about 950 amino acids, about 380 amino acids to about 900 amino acids, about 380 amino acids to about 850 amino acids, about 380 amino acids to about 800 amino acids, about 380 amino acids to about 750 amino acids, about 380 amino acids to about 700 amino acids, about 380 amino acids to about 650 amino acids, about 380 amino acids to about 600 amino acids, about 380 amino acids to about 550 amino acids, about 380 amino acids to about 500 amino acids, about 380 amino acids to about 480 amino acids, about 380 amino acids to about 460 amino acids, about 380 amino acids to about 440 amino acids, about 380 amino acids to about 420 amino acids, about 380 amino acids to about 400 amino acids, about 400 amino acids to about 3000 amino acids, about 400 amino acids to about 2500 amino acids, about 400 amino acids to about 2000 amino acids, about 400 amino acids to about 1500 amino acids, about 400 amino acids to about 1000 amino acids, about 400 amino acids to about 950 amino acids, about 400 amino acids to about 900 amino acids, about 400 amino acids to about 850 amino acids, about 400 amino acids to about 800 amino acids, about 400 amino acids to about 750 amino acids, about 400 amino acids to about 700 amino acids, about 400 amino acids to about 650 amino acids, about 400 amino acids to about 600 amino acids, about 400 amino acids to about 550 amino acids, about 400 amino acids to about 500 amino acids, about 400 amino acids to about 480 amino acids, about 400 amino acids to about 460 amino acids, about 400 amino acids to about 440 amino acids, about 400 amino acids to about 420 amino acids, about 420 amino acids to about 3000 amino acids, about 420 amino acids to about 2500 amino acids, about 420 amino acids to about 2000 amino acids, about 420 amino acids to about 1500 amino acids, about 420 amino acids to about 1000 amino acids, about 420 amino acids to about 950 amino acids, about 420 amino acids to about 900 amino acids, about 420 amino acids to about 850 amino acids, about 420 amino acids to about 800 amino acids, about 420 amino acids to about 750 amino acids, about 420 amino acids to about 700 amino acids, about 420 amino acids to about 650 amino acids, about 420 amino acids to about 600 amino acids, about 420 amino acids to about 550 amino acids, about 420 amino acids to about 500 amino acids, about 420 amino acids to about 480 amino acids, about 420 amino acids to about 460 amino acids, about 420 amino acids to about 440 amino acids, about 440 amino acids to about 3000 amino acids, about 440 amino acids to about 2500 amino acids, about 440 amino acids to about 2000 amino acids, about 440 amino acids to about 1500 amino acids, about 440 amino acids to about 1000 amino acids, about 440 amino acids to about 950 amino acids, about 440 amino acids to about 900 amino acids, about 440 amino acids to about 850 amino acids, about 440 amino acids to about 800 amino acids, about 440 amino acids to about 750 amino acids, about 440 amino acids to about 700 amino acids, about 440 amino acids to about 650 amino acids, about 440 amino acids to about 600 amino acids, about 440 amino acids to about 550 amino acids, about 440 amino acids to about 500 amino acids, about 440 amino acids to about 480 amino acids, about 440 amino acids to about 460 amino acids, about 460 amino acids to about 3000 amino acids, about 460 amino acids to about 2500 amino acids, about 460 amino acids to about 2000 amino acids, about 460 amino acids to about 1500 amino acids, about 460 amino acids to about 1000 amino acids, about 460 amino acids to about 950 amino acids, about 460 amino acids to about 900 amino acids, about 460 amino acids to about 850 amino acids, about 460 amino acids to about 800 amino acids, about 460 amino acids to about 750 amino acids, about 460 amino acids to about 700 amino acids, about 460 amino acids to about 650 amino acids, about 460 amino acids to about 600 amino acids, about 460 amino acids to about 550 amino acids, about 460 amino acids to about 500 amino acids, about 460 amino acids to about 480 amino acids, about 480 amino acids to about 3000 amino acids, about 480 amino acids to about 2500 amino acids, about 480 amino acids to about 2000 amino acids, about 480 amino acids to about 1500 amino acids, about 480 amino acids to about 1000 amino acids, about 480 amino acids to about 950 amino acids, about 480 amino acids to about 900 amino acids, about 480 amino acids to about 850 amino acids, about 480 amino acids to about 800 amino acids, about 480 amino acids to about 750 amino acids, about 480 amino acids to about 700 amino acids, about 480 amino acids to about 650 amino acids, about 480 amino acids to about 600 amino acids, about 480 amino acids to about 550 amino acids, about 480 amino acids to about 500 amino acids, about 500 amino acids to about 3000 amino acids, about 500 amino acids to about 2500 amino acids, about 500 amino acids to about 2000 amino acids, about 500 amino acids to about 1500 amino acids, about 500 amino acids to about 1000 amino acids, about 500 amino acids to about 950 amino acids, about 500 amino acids to about 900 amino acids, about 500 amino acids to about 850 amino acids, about 500 amino acids to about 800 amino acids, about 500 amino acids to about 750 amino acids, about 500 amino acids to about 700 amino acids, about 500 amino acids to about 650 amino acids, about 500 amino acids to about 600 amino acids, about 500 amino acids to about 550 amino acids, about 550 amino acids to about 3000 amino acids, about 550 amino acids to about 2500 amino acids, about 550 amino acids to about 2000 amino acids, about 550 amino acids to about 1500 amino acids, about 550 amino acids to about 1000 amino acids, about 550 amino acids to about 950 amino acids, about 550 amino acids to about 900 amino acids, about 550 amino acids to about 850 amino acids, about 550 amino acids to about 800 amino acids, about 550 amino acids to about 750 amino acids, about 550 amino acids to about 700 amino acids, about 550 amino acids to about 650 amino acids, about 550 amino acids to about 600 amino acids, about 600 amino acids to about 3000 amino acids, about 600 amino acids to about 2500 amino acids, about 600 amino acids to about 2000 amino acids, about 600 amino acids to about 1500 amino acids, about 600 amino acids to about 1000 amino acids, about 600 amino acids to about 950 amino acids, about 600 amino acids to about 900 amino acids, about 600 amino acids to about 850 amino acids, about 600 amino acids to about 800 amino acids, about 600 amino acids to about 750 amino acids, about 600 amino acids to about 700 amino acids, about 600 amino acids to about 650 amino acids, about 650 amino acids to about 3000 amino acids, about 650 amino acids to about 2500 amino acids, about 650 amino acids to about 2000 amino acids, about 650 amino acids to about 1500 amino acids, about 650 amino acids to about 1000 amino acids, about 650 amino acids to about 950 amino acids, about 650 amino acids to about 900 amino acids, about 650 amino acids to about 850 amino acids, about 650 amino acids to about 800 amino acids, about 650 amino acids to about 750 amino acids, about 650 amino acids to about 700 amino acids, about 700 amino acids to about 3000 amino acids, about 700 amino acids to about 2500 amino acids, about 700 amino acids to about 2000 amino acids, about 700 amino acids to about 1500 amino acids, about 700 amino acids to about 1000 amino acids, about 700 amino acids to about 950 amino acids, about 700 amino acids to about 900 amino acids, about 700 amino acids to about 850 amino acids, about 700 amino acids to about 800 amino acids, about 700 amino acids to about 750 amino acids, about 750 amino acids to about 3000 amino acids, about 750 amino acids to about 2500 amino acids, about 750 amino acids to about 2000 amino acids, about 750 amino acids to about 1500 amino acids, about 750 amino acids to about 1000 amino acids, about 750 amino acids to about 950 amino acids, about 750 amino acids to about 900 amino acids, about 750 amino acids to about 850 amino acids, about 750 amino acids to about 800 amino acids, about 800 amino acids to about 3000 amino acids, about 800 amino acids to about 2500 amino acids, about 800 amino acids to about 2000 amino acids, about 800 amino acids to about 1500 amino acids, about 800 amino acids to about 1000 amino acids, about 800 amino acids to about 950 amino acids, about 800 amino acids to about 900 amino acids, about 800 amino acids to about 850 amino acids, about 850 amino acids to about 3000 amino acids, about 850 amino acids to about 2500 amino acids, about 850 amino acids to about 2000 amino acids, about 850 amino acids to about 1500 amino acids, about 850 amino acids to about 1000 amino acids, about 850 amino acids to about 950 amino acids, about 850 amino acids to about 900 amino acids, about 900 amino acids to about 3000 amino acids, about 900 amino acids to about 2500 amino acids, about 900 amino acids to about 2000 amino acids, about 900 amino acids to about 1500 amino acids, about 900 amino acids to about 1000 amino acids, about 900 amino acids to about 950 amino acids, about 950 amino acids to about 3000 amino acids, about 950 amino acids to about 2500 amino acids, about 950 amino acids to about 2000 amino acids, about 950 amino acids to about 1500 amino acids, about 950 amino acids to about 1000 amino acids, about 1000 amino acids to about 3000 amino acids, about 1000 amino acids to about 2500 amino acids, about 1000 amino acids to about 2000 amino acids, about 1000 amino acids to about 1500 amino acids, about 1500 amino acids to about 3000 amino acids, about 1500 amino acids to about 2500 amino acids, about 1500 amino acids to about 2000 amino acids, about 2000 amino acids to about 3000 amino acids, about 2000 amino acids to about 2500 amino acids, or about 2500 amino acids to about 3000 amino acids.

[0422] In some embodiments of any of the single-chain chimeric polypeptides described herein, the first target-binding domain (e.g., any of the exemplary target-binding domains described herein or known in the art) and the soluble tissue factor domain (e.g., any of the exemplary soluble tissue factor domains described herein) directly abut each other. In some embodiments of any of the single-chain chimeric polypeptides described herein, the single-chain chimeric polypeptide further comprises a linker sequence (e.g., any of the exemplary linker sequences described herein or known in the art) between the first target-binding domain (e.g., any of the exemplary target-binding domains described herein or known in the art) and the soluble tissue factor domain (e.g., any of the exemplary soluble tissue factor domains described herein). In some embodiments of any of the single-chain chimeric polypeptides described herein, the soluble tissue factor domain (e.g., any of the exemplary soluble tissue factor domains described herein) and the second target-binding domain (e.g., any of the exemplary target-binding domains described herein or known in the art) directly abut each other. In some embodiments of any of the single-chain chimeric polypeptides described herein, the single-chain chimeric polypeptide further comprises a linker sequence (e.g., any of the exemplary linker sequences described herein or known in the art) between the soluble tissue factor domain (e.g., any of the exemplary soluble tissue factor domains described herein) and the second target-binding domain (e.g., any of the exemplary target-binding domains described herein or known in the art).

[0423] In some embodiments of any of the single-chain chimeric polypeptides described herein, the first target-binding domain (e.g., any of the exemplary target-binding domains described herein or known in the art) and the second target-binding domain (e.g., any of the exemplary target-binding domains described herein or known in the art) directly abut each other. In some embodiments of any of the single-chain chimeric polypeptides described herein, the single-chain chimeric polypeptide further comprises a linker sequence (e.g., any of the exemplary linker sequences described herein or known in the art) between the first target-binding domain (e.g., any of the exemplary target-binding domains described herein or known in the art) and the second target-binding domain (e.g., any of the exemplary target-binding domains described herein or known in the art). In some embodiments of any of the single-chain chimeric polypeptides described herein, the second target-binding domain (e.g., any of the exemplary target-binding domains described herein or known in the art) and the soluble tissue factor domain (e.g., any of the exemplary soluble tissue factor domains described herein) directly abut each other. In some embodiments of any of the single-chain chimeric polypeptides described herein, the single-chain chimeric polypeptide further comprises a linker sequence (e.g., any of the exemplary linker sequences described herein or known in the art) between the second target-binding domain (e.g., any of the exemplary target-binding domains described herein or known in the art) and the soluble tissue factor domain (e.g., any of the exemplary soluble tissue factor domains described herein or known in the art).

[0424] In some embodiments, a single-chain chimeric polypeptide can include a sequence that is at least 70% identical (e.g., at least 75% identical, at least 80% identical, at least 85% identical, at least 90% identical, at least 95% identical, at least 99% identical, or 100% identical) to

(SEQ ID NO: 85)
QIVLTQSPAIMSASPGEKVTMTCSASSSVSYMNWYQQKSGTSPKRWIYDT
SKLASGVPAHFRGSGSGTSYSLTISGMEAEDAATYYCQQWSSNPFTFGSG
TKLEINRGGGGSGGGGSGGGGSQVQLQQSGAELARPGASVKMSCKASGYT
FTRYTMHWVKQRPGQGLEWIGYINPSRGYTNYNQKFKDKATLTTDKSSST
AYMQLSSLTSEDSAVYYCARYYDDHYCLDYWGQGTTLTVSSSGTTNTVAA
YNLTWKSTNFKTILEWEPKPVNQVYTVQISTKSGDWKSKCFYTTDTECDL
TDEIVKDVKQTYLARVFSYPAGNVESTGSAGEPLYENSPEFTPYLETNLG
QPTIQSFEQVGTKVNVTVEDERTLVRRNNTFLSLRDVFGKDLIYTLYYWK
SSSSGKKTAKTNTNEFLIDVDKGENYCFSVQAVIPSRTVNRKSTDSPVEC
MGQEKGEFREVQLQQSGPELVKPGASVKMSCKASGYTFTSYVIQWVKQKP
GQGLEWIGSINPYNDYTKYNEKFKGKATLTSDKSSITAYMEFSSLTSEDS
ALYYCARWGDGNYWGRGTTLTVSSGGGGSGGGGSGGGGSDIEMTQSPAIM
SASLGERVTMTCTASSSVSSSYFHWYQQKPGSSPKLCIYSTSNLASGVPP
RFSGSGSTSYSLTISSMEAEDAATYFCHQYHRSPTFGGGTKLETKR.

[0425] In some embodiments, a single-chain chimeric polypeptide is encoded by a nucleic acid that includes a sequence that is at least 70% identical (e.g., at least 75% identical, at least 80% identical, at least 85% identical, at least 90% identical, at least 95% identical, at least 99% identical, or 100% identical) to

(SEQ ID NO: 86)
CAGATCGTGCTGACCCAAAGCCCCGCCATCATGAGCGCTAGCCCCGGTGA
GAAGGTGACCATGACATGCTCCGCTTCCAGCTCCGTGTCCTACATGAACT
GGTATCAGCAGAAAAGCGGAACCAGCCCCAAAAGGTGGATCTACGACACC
AGCAAGCTGGCCTCCGGAGTGCCCGCTCATTTCCGGGGCTCTGGATCCGG
CACCAGCTACTCTTTAACCATTTCCGGCATGGAAGCTGAAGACGCTGCCA
CCTACTATTGCCAGCAATGGAGCAGCAACCCCTTCACATTCGGATCTGGC
ACCAAGCTCGAAATCAATCGTGGAGGAGGTGGCAGCGGCGGCGGTGGATC
CGGCGGAGGAGGAAGCCAAGTTCAACTCCAGCAGAGCGGCGCTGAACTGG
CCCGGCCCGGCGCCTCCGTCAAGATGAGCTGCAAGGCTTCCGGCTATACA
TTTACTCGTTACACAATGCATTGGGTCAAGCAGAGGCCCGGTCAAGGTTT
AGAGTGGATCGGATATATCAACCCTTCCCGGGGCTACACCAACTATAACC
AAAAGTTCAAGGATAAAGCCACTTTAACCACTGACAAGAGCTCCTCCACC
GCCTACATGCAGCTGTCCTCTTTAACCAGCGAGGACTCCGCTGTTTACTA
CTGCGCTAGGTATTACGACGACCACTACTGTTTAGACTATTGGGGACAAG
GTACCACTTTAACCGTCAGCAGCTCCGGCACCACCAATACCGTGGCCGCT
TATAACCTCACATGGAAGAGCACCAACTTCAAGACAATTCTGGAATGGGA
ACCCAAGCCCGTCAATCAAGTTTACACCGTGCAGATCTCCACCAAATCCG
GAGACTGGAAGAGCAAGTGCTTCTACACAACAGACACCGAGTGTGATTTA
ACCGACGAAATCGTCAAGGACGTCAAGCAAACCTATCTGGCTCGGGTCTT
TTCCTACCCCGCTGGCAATGTCGAGTCCACCGGCTCCGCTGGCGAGCCTC
TCTACGAGAATTCCCCCGAATTCACCCCTTATTTAGAGACCAATTTAGGC
CAGCCTACCATCCAGAGCTTCGAGCAAGTTGGCACCAAGGTGAACGTCAC
CGTCGAGGATGAAAGGACTTTAGTGCGGCGGAATAACACATTTTTATCCC
TCCGGGATGTGTTCGGCAAAGACCTCATCTACACACTGTACTATTGGAAG
TCCAGCTCCTCCGGCAAAAAGACCGCTAAGACCAACACCAACGAGTTTTT
AATTGACGTGGACAAAGGCGAGAACTACTGCTTCAGCGTGCAAGCCGTGA
TCCCTTCTCGTACCGTCAACCGGAAGAGCACAGATTCCCCCGTTGAGTGC
ATGGGCCAAGAAAAGGGCGAGTTCCGGGAGGTCCAGCTGCAGCAGAGCGG
ACCCGAACTCGTGAAACCCGGTGCTTCCGTGAAAATGTCTTGTAAGGCCA
GCGGATACACCTTCACCTCCTATGTGATCCAGTGGGTCAAACAGAAGCCC
GGACAAGGTCTCGAGTGGATCGGCAGCATCAACCCTTACAACGACTATAC
CAAATACAACGAGAAGTTTAAGGGAAAGGCTACTTTAACCTCCGACAAAA
GCTCCATCACAGCCTACATGGAGTTCAGCTCTTTAACATCCGAGGACAGC
GCTCTGTACTATTGCGCCCGGTGGGGCGACGGCAATTACTGGGGACGGGG
CACAACACTGACCGTGAGCAGCGGAGGCGGAGGCTCCGGCGGAGGCGGAT
CTGGCGGTGGCGGCTCCGACATCGAGATGACCCAGTCCCCCGCTATCATG
TCCGCCTCTTTAGGCGAGCGGGTCACAATGACTTGTACAGCCTCCTCCAG
CGTCTCCTCCTCCTACTTCCATTGGTACCAACAGAAACCCGGAAGCTCCC
CTAAACTGTGCATCTACAGCACCAGCAATCTCGCCAGCGGCGTGCCCCCT
AGGTTTTCCGGAAGCGGAAGCACCAGCTACTCTTTAACCATCTCCTCCAT
GGAGGCTGAGGATGCCGCCACCTACTTTTGTCACCAGTACCACCGGTCCC
CCACCTTCGGAGGCGGCACCAAACTGGAGACAAAGAGG.

[0426] In some embodiments, a single-chain chimeric polypeptide can include a sequence that is at least 70% identical (e.g., at least 75% identical, at least 80% identical, at least 85% identical, at least 90% identical, at least 95% identical, at least 99% identical, or 100% identical) to

(SEQ ID NO: 87)
MKWVTFISLLFLFSSAYSQIVLTQSPAIMSASPGEKVTMTCSASSSVSYM
NWYQQKSGTSPKRWIYDTSKLASGVPAHFRGSGSGTSYSLTISGMEAEDA
ATYYCQQWSSNPFTFGSGTKLEINRGGGGSGGGGSGGGGSQVQLQQSGAE
LARPGASVKMSCKASGYTFTRYTMHWVKQRPGQGLEWIGYINPSRGYTNY
NQKFKDKATLTTDKSSSTAYMQLSSLTSEDSAVYYCARYYDDHYCLDYWG
QGTTLTVSSSGTTNTVAAYNLTWKSTNFKTILEWEPKPVNQVYTVQISTK
SGDWKSKCFYTTDTECDLTDEIVKDVKQTYLARVFSYPAGNVESTGSAGE
PLYENSPEFTPYLETNLGQPTIQSFEQVGTKVNVTVEDERTLVRRNNTFL
SLRDVFGKDLIYTLYYWKSSSSGKKTAKTNTNEFLIDVDKGENYCFSVQA
VIPSRTVNRKSTDSPVECMGQEKGEFREVQLQQSGPELVKPGASVKMSCK
ASGYTFTSYVIQWVKQKPGQGLEWIGSINPYNDYTKYNEKFKGKATLTSD
KSSITAYMEFSSLTSEDSALYYCARWGDGNYWGRGTTLTVSSGGGGSGGG
GSGGGGSDIEMTQSPAIMSASLGERVTMTCTASSSVSSSYFHWYQQKPGS
SPKLCIYSTSNLASGVPPRFSGSGSTSYSLTISSMEAEDAATYFCHQYHR
SPTFGGGTKLETKR.

[0427] In some embodiments, a single-chain chimeric polypeptide is encoded by a nucleic acid that includes a sequence that is at least 70% identical (e.g., at least 75% identical, at least 80% identical, at least 85% identical, at least 90% identical, at least 95% identical, at least 99% identical, or 100% identical) to

(SEQ ID NO: 88)
ATGAAGTGGGTGACCTTCATCAGCTTATTATTTTTATTCAGCTCCGCCTA
TTCCCAGATCGTGCTGACCCAAAGCCCCGCCATCATGAGCGCTAGCCCCG
GTGAGAAGGTGACCATGACATGCTCCGCTTCCAGCTCCGTGTCCTACATG
AACTGGTATCAGCAGAAAAGCGGAACCAGCCCCAAAAGGTGGATCTACGA
CACCAGCAAGCTGGCCTCCGGAGTGCCCGCTCATTTCCGGGGCTCTGGAT
CCGGCACCAGCTACTCTTTAACCATTTCCGGCATGGAAGCTGAAGACGCT
GCCACCTACTATTGCCAGCAATGGAGCAGCAACCCCTTCACATTCGGATC
TGGCACCAAGCTCGAAATCAATCGTGGAGGAGGTGGCAGCGGCGGCGGTG
GATCCGGCGGAGGAGGAAGCCAAGTTCAACTCCAGCAGAGCGGCGCTGAA
CTGGCCCGGCCCGGCGCCTCCGTCAAGATGAGCTGCAAGGCTTCCGGCTA
TACATTTACTCGTTACACAATGCATTGGGTCAAGCAGAGGCCCGGTCAAG
GTTTAGAGTGGATCGGATATATCAACCCTTCCCGGGGCTACACCAACTAT
AACCAAAAGTTCAAGGATAAAGCCACTTTAACCACTGACAAGAGCTCCTC
CACCGCCTACATGCAGCTGTCCTCTTTAACCAGCGAGGACTCCGCTGTTT
ACTACTGCGCTAGGTATTACGACGACCACTACTGTTTAGACTATTGGGGA
CAAGGTACCACTTTAACCGTCAGCAGCTCCGGCACCACCAATACCGTGGC
CGCTTATAACCTCACATGGAAGAGCACCAACTTCAAGACAATTCTGGAAT
GGGAACCCAAGCCCGTCAATCAAGTTTACACCGTGCAGATCTCCACCAAA
TCCGGAGACTGGAAGAGCAAGTGCTTCTACACAACAGACACCGAGTGTGA
TTTAACCGACGAAATCGTCAAGGACGTCAAGCAAACCTATCTGGCTCGGG
TCTTTTCCTACCCCGCTGGCAATGTCGAGTCCACCGGCTCCGCTGGCGAG
CCTCTCTACGAGAATTCCCCCGAATTCACCCCTTATTTAGAGACCAATTT
AGGCCAGCCTACCATCCAGAGCTTCGAGCAAGTTGGCACCAAGGTGAACG
TCACCGTCGAGGATGAAAGGACTTTAGTGCGGCGGAATAACACATTTTTA
TCCCTCCGGGATGTGTTCGGCAAAGACCTCATCTACACACTGTACTATTG
GAAGTCCAGCTCCTCCGGCAAAAAGACCGCTAAGACCAACACCAACGAGT
TTTTAATTGACGTGGACAAAGGCGAGAACTACTGCTTCAGCGTGCAAGCC
GTGATCCCTTCTCGTACCGTCAACCGGAAGAGCACAGATTCCCCCGTTGA
GTGCATGGGCCAAGAAAAGGGCGAGTTCCGGGAGGTCCAGCTGCAGCAGA
GCGGACCCGAACTCGTGAAACCCGGTGCTTCCGTGAAAATGTCTTGTAAG
GCCAGCGGATACACCTTCACCTCCTATGTGATCCAGTGGGTCAAACAGAA
GCCCGGACAAGGTCTCGAGTGGATCGGCAGCATCAACCCTTACAACGACT
ATACCAAATACAACGAGAAGTTTAAGGGAAAGGCTACTTTAACCTCCGAC
AAAAGCTCCATCACAGCCTACATGGAGTTCAGCTCTTTAACATCCGAGGA
CAGCGCTCTGTACTATTGCGCCCGGTGGGGCGACGGCAATTACTGGGGAC
GGGGCACAACACTGACCGTGAGCAGCGGAGGCGGAGGCTCCGGCGGAGGC
GGATCTGGCGGTGGCGGCTCCGACATCGAGATGACCCAGTCCCCCGCTAT
CATGTCCGCCTCTTTAGGCGAGCGGGTCACAATGACTTGTACAGCCTCCT
CCAGCGTCTCCTCCTCCTACTTCCATTGGTACCAACAGAAACCCGGAAGC
TCCCCTAAACTGTGCATCTACAGCACCAGCAATCTCGCCAGCGGCGTGCC
CCCTAGGTTTTCCGGAAGCGGAAGCACCAGCTACTCTTTAACCATCTCCT
CCATGGAGGCTGAGGATGCCGCCACCTACTTTTGTCACCAGTACCACCGG
TCCCCCACCTTCGGAGGCGGCACCAAACTGGAGACAAAGAGG.

[0428] In some embodiments, a single-chain chimeric polypeptide can include a sequence that is at least 70% identical (e.g., at least 75% identical, at least 80% identical, at least 85% identical, at least 90% identical, at least 95% identical, at least 99% identical, or 100% identical) to

(SEQ ID NO: 89)
VQLQQSGPELVKPGASVKMSCKASGYTFTSYVIQWVKQKPGQGLEWIGSI
NPYNDYTKYNEKFKGKATLTSDKSSITAYMEFSSLTSEDSALYYCARWGD
GNYWGRGTTLTVSSGGGGSGGGGSGGGGSDIEMTQSPAIMSASLGERVTM
TCTASSSVSSSYFHWYQQKPGSSPKLCIYSTSNLASGVPPRFSGSGSTSY
SLTISSMEAEDAATYFCHQYHRSPTFGGGTKLETKRSGTTNTVAAYNLTW
KSTNFKTILEWEPKPVNQVYTVQISTKSGDWKSKCFYTTDTECDLTDEIV
KDVKQTYLARVFSYPAGNVESTGSAGEPLYENSPEFTPYLETNLGQPTIQ
SFEQVGTKVNVTVEDERTLVRRNNTFLSLRDVFGKDLIYTLYYWKSSSSG
KKTAKTNTNEFLIDVDKGENYCFSVQAVIPSRTVNRKSTDSPVECMGQEK
GEFREQIVLTQSPAIMSASPGEKVTMTCSASSSVSYMNWYQQKSGTSPKR
WIYDTSKLASGVPAHFRGSGSGTSYSLTISGMEAEDAATYYCQQWSSNPF
TFGSGTKLEINRGGGGSGGGGSGGGGSQVQLQQSGAELARPGASVKMSCK
ASGYTFTRYTMHWVKQRPGQGLEWIGYINPSRGYTNYNQKFKDKATLTTD
KSSSTAYMQLSSLTSEDSAVYYCARYYDDHYCLDYWGQGTTLTVSS.

[0429] In some embodiments, a single-chain chimeric polypeptide is encoded by a nucleic acid that includes a sequence that is at least 70% identical (e.g., at least 75% identical, at least 80% identical, at least 85% identical, at least 90% identical, at least 95% identical, at least 99% identical, or 100% identical) to

(SEQ ID NO: 90)
GTGCAGCTGCAGCAGTCCGGACCCGAACTGGTCAAGCCCGGTGCCTCCGT
GAAAATGTCTTGTAAGGCTTCTGGCTACACCTTTACCTCCTACGTCATCC
AATGGGTGAAGCAGAAGCCCGGTCAAGGTCTCGAGTGGATCGGCAGCATC
AATCCCTACAACGATTACACCAAGTATAACGAAAAGTTTAAGGGCAAGGC
CACTCTGACAAGCGACAAGAGCTCCATTACCGCCTACATGGAGTTTTCCT
CTTTAACTTCTGAGGACTCCGCTTTATACTATTGCGCTCGTTGGGGCGAT
GGCAATTATTGGGGCCGGGGAACTACTTTAACAGTGAGCTCCGGCGGCGG
CGGAAGCGGAGGTGGAGGATCTGGCGGTGGAGGCAGCGACATCGAGATGA
CACAGTCCCCCGCTATCATGAGCGCCTCTTTAGGAGAACGTGTGACCATG
ACTTGTACAGCTTCCTCCAGCGTGAGCAGCTCCTATTTCCACTGGTACCA
GCAGAAACCCGGCTCCTCCCCTAAACTGTGTATCTACTCCACAAGCAATT
TAGCTAGCGGCGTGCCTCCTCGTTTTAGCGGCTCCGGCAGCACCTCTTAC
TCTTTAACCATTAGCTCTATGGAGGCCGAAGATGCCGCCACATACTTTTG
CCATCAGTACCACCGGTCCCCTACCTTTGGCGGAGGCACAAAGCTGGAGA
CCAAGCGGAGCGGCACCACCAACACAGTGGCCGCCTACAATCTGACTTGG
AAATCCACCAACTTCAAGACCATCCTCGAGTGGGAGCCCAAGCCCGTTAA
TCAAGTTTATACCGTGCAGATTTCCACCAAGAGCGGCGACTGGAAATCCA
AGTGCTTCTATACCACAGACACCGAGTGCGATCTCACCGACGAGATCGTC
AAAGACGTGAAGCAGACATATTTAGCTAGGGTGTTCTCCTACCCCGCTGG
AAACGTGGAGAGCACCGGATCCGCTGGAGAGCCTTTATACGAGAACTCCC
CCGAATTCACCCCCTATCTGGAAACCAATTTAGGCCAGCCCACCATCCAG
AGCTTCGAACAAGTTGGCACAAAGGTGAACGTCACCGTCGAAGATGAGAG
GACTTTAGTGCGGAGGAACAATACATTTTTATCCTTACGTGACGTCTTCG
GCAAGGATTTAATCTACACACTGTATTACTGGAAGTCTAGCTCCTCCGGC
AAGAAGACCGCCAAGACCAATACCAACGAATTTTTAATTGACGTGGACAA
GGGCGAGAACTACTGCTTCTCCGTGCAAGCTGTGATCCCCTCCCGGACAG
TGAACCGGAAGTCCACCGACTCCCCCGTGGAGTGCATGGGCCAAGAGAAG
GGAGAGTTTCGTGAGCAGATCGTGCTGACCCAGTCCCCCGCTATTATGAG
CGCTAGCCCCGGTGAAAAGGTGACTATGACATGCAGCGCCAGCTCTTCCG
TGAGCTACATGAACTGGTATCAGCAGAAGTCCGGCACCAGCCCTAAAAGG
TGGATCTACGACACCAGCAAGCTGGCCAGCGGCGTCCCCGCTCACTTTCG
GGGCTCCGGCTCCGGAACAAGCTACTCTCTGACCATCAGCGGCATGGAAG
CCGAGGATGCCGCTACCTATTACTGTCAGCAGTGGAGCTCCAACCCCTTC
ACCTTTGGATCCGGCACCAAGCTCGAGATTAATCGTGGAGGCGGAGGTAG
CGGAGGAGGCGGATCCGGCGGTGGAGGTAGCCAAGTTCAGCTCCAGCAAA
GCGGCGCCGAACTCGCTCGGCCCGGCGCTTCCGTGAAGATGTCTTGTAAG
GCCTCCGGCTATACCTTCACCCGGTACACAATGCACTGGGTCAAGCAACG
GCCCGGTCAAGGTTTAGAGTGGATTGGCTATATCAACCCCTCCCGGGGCT
ATACCAACTACAACCAGAAGTTCAAGGACAAAGCCACCCTCACCACCGAC
AAGTCCAGCAGCACCGCTTACATGCAGCTGAGCTCTTTAACATCCGAGGA
TTCCGCCGTGTACTACTGCGCTCGGTACTACGACGATCATTACTGCCTCG
ATTACTGGGGCCAAGGTACCACCTTAACAGTCTCCTCC.

[0430] In some embodiments, a single-chain chimeric polypeptide can include a sequence that is at least 70% identical (e.g., at least 75% identical, at least 80% identical, at least 85% identical, at least 90% identical, at least 95% identical, at least 99% identical, or 100% identical) to

(SEQ ID NO: 91)
MKWVTFISLLFLFSSAYSVQLQQSGPELVKPGASVKMSCKASGYTFTSYV
IQWVKQKPGQGLEWIGSINPYNDYTKYNEKFKGKATLTSDKSSITAYMEF
SSLTSEDSALYYCARWGDGNYWGRGTTLTVSSGGGGSGGGGSGGGGSDIE
MTQSPAIMSASLGERVTMTCTASSSVSSSYFHWYQQKPGSSPKLCIYSTS
NLASGVPPRFSGSGSTSYSLTISSMEAEDAATYFCHQYHRSPTFGGGTKL
ETKRSGTTNTVAAYNLTWKSTNFKTILEWEPKPVNQVYTVQISTKSGDWK
SKCFYTTDTECDLTDEIVKDVKQTYLARVFSYPAGNVESTGSAGEPLYEN
SPEFTPYLETNLGQPTIQSFEQVGTKVNVTVEDERTLVRRNNTFLSLRDV
FGKDLIYTLYYWKSSSSGKKTAKTNTNEFLIDVDKGENYCFSVQAVIPSR
TVNRKSTDSPVECMGQEKGEFREQIVLTQSPAIMSASPGEKVTMTCSASS
SVSYMNWYQQKSGTSPKRWIYDTSKLASGVPAHFRGSGSGTSYSLTISGM
EAEDAATYYCQQWSSNPFTFGSGTKLEINRGGGGSGGGGSGGGGSQVQLQ
QSGAELARPGASVKMSCKASGYTFTRYTMHWVKQRPGQGLEWIGYINPSR
GYTNYNQKFKDKATLTTDKSSSTAYMQLSSLTSEDSAVYYCARYYDDHYC
LDYWGQGTTLTVSS.

[0431] In some embodiments, a single-chain chimeric polypeptide is encoded by a nucleic acid that includes a sequence that is at least 70% identical (e.g., at least 75% identical, at least 80% identical, at least 85% identical, at least 90% identical, at least 95% identical, at least 99% identical, or 100% identical) to

(SEQ ID NO: 92)
ATGAAATGGGTCACCTTCATCTCTTTACTGTTTTTATTTAGCAGCGCCTA
CAGCGTGCAGCTGCAGCAGTCCGGACCCGAACTGGTCAAGCCCGGTGCCT
CCGTGAAAATGTCTTGTAAGGCTTCTGGCTACACCTTTACCTCCTACGTC
ATCCAATGGGTGAAGCAGAAGCCCGGTCAAGGTCTCGAGTGGATCGGCAG
CATCAATCCCTACAACGATTACACCAAGTATAACGAAAAGTTTAAGGGCA
AGGCCACTCTGACAAGCGACAAGAGCTCCATTACCGCCTACATGGAGTTT
TCCTCTTTAACTTCTGAGGACTCCGCTTTATACTATTGCGCTCGTTGGGG
CGATGGCAATTATTGGGGCCGGGGAACTACTTTAACAGTGAGCTCCGGCG
GCGGCGGAAGCGGAGGTGGAGGATCTGGCGGTGGAGGCAGCGACATCGAG
ATGACACAGTCCCCCGCTATCATGAGCGCCTCTTTAGGAGAACGTGTGAC
CATGACTTGTACAGCTTCCTCCAGCGTGAGCAGCTCCTATTTCCACTGGT
ACCAGCAGAAACCCGGCTCCTCCCCTAAACTGTGTATCTACTCCACAAGC
AATTTAGCTAGCGGCGTGCCTCCTCGTTTTAGCGGCTCCGGCAGCACCTC
TTACTCTTTAACCATTAGCTCTATGGAGGCCGAAGATGCCGCCACATACT
TTTGCCATCAGTACCACCGGTCCCCTACCTTTGGCGGAGGCACAAAGCTG
GAGACCAAGCGGAGCGGCACCACCAACACAGTGGCCGCCTACAATCTGAC
TTGGAAATCCACCAACTTCAAGACCATCCTCGAGTGGGAGCCCAAGCCCG
TTAATCAAGTTTATACCGTGCAGATTTCCACCAAGAGCGGCGACTGGAAA
TCCAAGTGCTTCTATACCACAGACACCGAGTGCGATCTCACCGACGAGAT
CGTCAAAGACGTGAAGCAGACATATTTAGCTAGGGTGTTCTCCTACCCCG
CTGGAAACGTGGAGAGCACCGGATCCGCTGGAGAGCCTTTATACGAGAAC
TCCCCCGAATTCACCCCCTATCTGGAAACCAATTTAGGCCAGCCCACCAT
CCAGAGCTTCGAACAAGTTGGCACAAAGGTGAACGTCACCGTCGAAGATG
AGAGGACTTTAGTGCGGAGGAACAATACATTTTTATCCTTACGTGACGTC
TTCGGCAAGGATTTAATCTACACACTGTATTACTGGAAGTCTAGCTCCTC
CGGCAAGAAGACCGCCAAGACCAATACCAACGAATTTTTAATTGACGTGG
ACAAGGGCGAGAACTACTGCTTCTCCGTGCAAGCTGTGATCCCCTCCCGG
ACAGTGAACCGGAAGTCCACCGACTCCCCCGTGGAGTGCATGGGCCAAGA
GAAGGGAGAGTTTCGTGAGCAGATCGTGCTGACCCAGTCCCCCGCTATTA
TGAGCGCTAGCCCCGGTGAAAAGGTGACTATGACATGCAGCGCCAGCTCT
TCCGTGAGCTACATGAACTGGTATCAGCAGAAGTCCGGCACCAGCCCTAA
AAGGTGGATCTACGACACCAGCAAGCTGGCCAGCGGCGTCCCCGCTCACT
TTCGGGGCTCCGGCTCCGGAACAAGCTACTCTCTGACCATCAGCGGCATG
GAAGCCGAGGATGCCGCTACCTATTACTGTCAGCAGTGGAGCTCCAACCC
CTTCACCTTTGGATCCGGCACCAAGCTCGAGATTAATCGTGGAGGCGGAG
GTAGCGGAGGAGGCGGATCCGGCGGTGGAGGTAGCCAAGTTCAGCTCCAG
CAAAGCGGCGCCGAACTCGCTCGGCCCGGCGCTTCCGTGAAGATGTCTTG
TAAGGCCTCCGGCTATACCTTCACCCGGTACACAATGCACTGGGTCAAGC
AACGGCCCGGTCAAGGTTTAGAGTGGATTGGCTATATCAACCCCTCCCGG
GGCTATACCAACTACAACCAGAAGTTCAAGGACAAAGCCACCCTCACCAC
CGACAAGTCCAGCAGCACCGCTTACATGCAGCTGAGCTCTTTAACATCCG
AGGATTCCGCCGTGTACTACTGCGCTCGGTACTACGACGATCATTACTGC
CTCGATTACTGGGGCCAAGGTACCACCTTAACAGTCTCCTCC.

[0432] Some embodiments of any of the single-chain chimeric polypeptides described herein can further include one or more (e.g., two, three, four, five, six, seven, eight, nine, or ten) additional target-binding domains (e.g., any of the exemplary target-binding domains described herein or known in the art) at its N- and/or C-terminus.

[0433] In some embodiments, the single-chain chimeric polypeptides can include one or more (e.g., two, three, four, five, six, seven, eight, nine, or ten) additional target-binding domains (e.g., any of the exemplary target-binding domains described herein or known in the art) at its N-terminus. In some embodiments, one of the one or more additional target-binding domains (e.g., any of the exemplary target-binding domains described herein or known in the art) at the N-terminus of the single-chain chimeric polypeptide can directly abut the first target-binding domain (e.g., any of the exemplary target-binding domains described herein or known in the art), the second target-binding domain (e.g., any of the exemplary target-binding domains described herein or known in the art), or the soluble tissue factor domain (e.g., any of the exemplary soluble tissue factor domains described herein). In some embodiments, the single-chain chimeric polypeptide further includes a linker sequence (e.g., any of the exemplary linker sequences described herein or known in the art) between one of the at least one additional target-binding domains (e.g., any of the exemplary target-binding domains described herein or known in the art) at the N-terminus of the single-chain chimeric polypeptide and the first target-binding domain (e.g., any of the exemplary target-binding domains described herein or known in the art), the second target-binding domain (e.g., any of the exemplary target-binding domains described herein or known in the art), or the soluble tissue factor domain (e.g., any of the exemplary soluble tissue factor domains described herein).

[0434] In some embodiments of any of the single-chain chimeric polypeptides described herein, the single-chain chimeric polypeptide includes one or more (e.g., two, three, four, five, six, seven, eight, nine, or ten) additional target-binding domains (e.g., any of the exemplary target-binding domains described herein or known in the art) at its C-terminus. In some embodiments, one of the one or more additional target-binding domains (e.g., any of the exemplary target-binding domains described herein or known in the art) at the C-terminus of the single-chain chimeric polypeptide directly abuts the first target-binding domain (e.g., any of the exemplary target-binding domains described herein or known in the art), the second target-binding domain (e.g., any of the exemplary target-binding domains described herein or known in the art), or the soluble tissue factor domain (e.g., any of the exemplary soluble tissue factor domains described herein or known in the art). In some embodiments, the single-chain chimeric polypeptide further comprises a linker sequence (e.g., any of the exemplary linker sequences described herein or known in the art) between one of the at least one additional target-binding domains (e.g., any of the exemplary target-binding domains described herein or known in the art) at the C-terminus of the single-chain chimeric polypeptide and the first target-binding domain (e.g., any of the exemplary target-binding domains described herein or known in the art), the second target-binding domain (e.g., any of the exemplary target-binding domains described herein or known in the art), or the soluble tissue factor domain (e.g., any of the exemplary soluble tissue factor domains described herein).

[0435] In some embodiments of any of the single-chain chimeric polypeptides described herein, the single-chain chimeric polypeptide comprises one or more (e.g., two, three, four, five, six, seven, eight, nine, or ten) additional target binding domains (e.g., any of the exemplary target-binding domains described herein or known in the art) at its N-terminus and its C-terminus. In some embodiments, one of the one or more additional antigen binding domains (e.g., any of the exemplary target-binding domains described herein or known in the art) at the N-terminus of the single-chain chimeric polypeptide directly abuts the first target-binding domain (e.g., any of the exemplary target-binding domains described herein or known in the art), the second target-binding domain (e.g., any of the exemplary target-binding domains described herein or known in the art), or the soluble tissue factor domain (e.g., any of the exemplary soluble tissue factor domains described herein). In some embodiments, the single-chain chimeric polypeptide further includes a linker sequence (e.g., any of the exemplary linker sequences described herein or known in the art) between one of the one or more additional antigen-binding domains (e.g., any of the exemplary target-binding domains described herein or known in the art) at the N-terminus and the first target-binding domain (e.g., any of the exemplary target-binding domains described herein or known in the art), the second target-binding domain (e.g., any of the exemplary target-binding domains described herein or known in the art), or the soluble tissue factor domain (e.g., any of the exemplary soluble tissue factor domains). In some embodiments, one of the one or more additional antigen binding domains (e.g., any of the exemplary target-binding domains described herein or known in the art) at the C-terminus directly abuts the first target-binding domain (e.g., any of the exemplary target-binding domains described herein or known in the art), the second target-binding domain (e.g., any of the exemplary target-binding domains described herein or known in the art), or the soluble tissue factor domain (e.g., any of the exemplary soluble tissue factor domains). In some embodiments, the single-chain chimeric polypeptide further includes a linker sequence (e.g., any of the exemplary linker sequences described herein or known in the art) between one of the one or more additional antigen-binding domains (e.g., any of the exemplary target-binding domains described herein or known in the art) at the C-terminus and the first target-binding domain (e.g., any of the exemplary target-binding domains described herein or known in the art), the second target-binding domain (e.g., any of the exemplary target-binding domains described herein or known in the art), or the soluble tissue factor domain (e.g., any of the exemplary soluble tissue factor domains described herein).

[0436] In some embodiments of any of the single-chain chimeric polypeptides described herein, two or more (e.g., three, four, five, six, seven, eight, nine, or ten) of the first target-binding domain (e.g., any of the exemplary target-binding domains described herein or known in the art), the second target-binding domain (e.g., any of the exemplary target-binding domains described herein or known in the art), and the one or more additional target-binding domains (e.g., any of the exemplary target-binding domains described herein or known in the art) bind specifically to the same antigen. In some embodiments, two or more (e.g., three, four, five, six, seven, eight, nine, or ten) of the first target-binding domain (e.g., any of the exemplary target-binding domains described herein or known in the art), the second target-binding domain (e.g., any of the exemplary target-binding domains described herein or known in the art), and the one or more additional target-binding domains (e.g., any of the exemplary target-binding domains described herein or known in the art) bind specifically to the same epitope. In some embodiments, two or more (e.g., three, four, five, six, seven, eight, nine, or ten) of the first target-binding domain (e.g., any of the exemplary target-binding domains described herein or known in the art), the second target-binding domain (e.g., any of the exemplary target-binding domains described herein or known in the art), and the one or more additional target-binding domains (e.g., any of the exemplary target-binding domains described herein or known in the art) include the same amino acid sequence.

[0437] In some embodiments of any of the single-chain chimeric polypeptides described herein, the first target-binding domain (e.g., any of the exemplary target-binding domains described herein or known in the art), the second target-binding domain (e.g., any of the exemplary target-binding domains described herein or known in the art), and the one or more (e.g., two, three, four, five, six, seven, eight, nine, or ten) additional target-binding domains (e.g., any of the exemplary target-binding domains described herein or known in the art) each bind specifically to the same antigen. In some embodiments, the first target-binding domain (e.g., any of the exemplary target-binding domains described herein or known in the art), the second target-binding domain (e.g., any of the exemplary target-binding domains described herein or known in the art), and the one or more (e.g., two, three, four, five, six, seven, eight, nine, or ten) additional target-binding domains (e.g., any of the exemplary target-binding domains described herein or known in the art) each bind specifically to the same epitope. In some embodiments, the first target-binding domain, the second target-binding domain, and the one or more (e.g., two, three, four, five, six, seven, eight, nine, or ten) additional target-binding domains each comprise the same amino acid sequence.

[0438] In some embodiments of any of the single-chain chimeric polypeptides described herein, the first target-binding domain (e.g., any of the exemplary target-binding domains described herein or known in the art), the second target-binding domain (e.g., any of the exemplary target-binding domains described herein or known in the art), and the one or more (e.g., two, three, four, five, six, seven, eight, nine, or ten) additional target-binding domains (e.g., any of the exemplary target-binding domains described herein or known in the art) bind specifically to different antigens.

[0439] In some embodiments of any of the single-chain chimeric polypeptides, one or more of the first target-binding domain, the second target-binding domain, and the one or more target-binding domains is an antigen-binding domain (e.g., any of the exemplary antigen-binding domains described herein or known in the art). In some embodiments of any of the single-chain chimeric polypeptides described herein, the first target-binding domain, the second target-binding domain, and the one or more additional target-binding domains are each an antigen-binding domain (e.g., any of the exemplary antigen-binding domains described herein or known in the art). In some embodiments, the antigen-binding domain can include a scFv or a single domain antibody.

[0440] In some embodiments of any of the single-chain chimeric polypeptides described herein, one or more (e.g., two, three, four, five, six, seven, eight, nine, or ten) of the first target-binding domain (e.g., any of the exemplary target-binding domains described herein or known in the art), the second target-binding domain (e.g., any of the exemplary target-binding domains described herein or known in the art), and the one or more additional target-binding domains (e.g., any of the exemplary target-binding domains described herein or known in the art) bind specifically to a target selected from the group consisting of: CD16a, CD28, CD3, CD33, CD20, CD19, CD22, CD123, IL-1R, IL-1, VEGF, IL-6R, IL-4, IL-10, PDL-1, TIGIT, PD-1, TIM3, CTLA4, MICA, MICB, IL-6, IL-8, TNFα, CD26, CD36, ULBP2, CD30, CD200, IGF-1R, MUC4AC, MUC5AC, Trop-2, CMET, EGFR, HER1, HER2, HER3, PSMA, CEA, B7H3, EPCAM, BCMA, P-cadherin, CEACAM5, a UL16-binding protein, HLA-DR, DLL4, TYRO3, AXL, MER, CD122, CD155, PDGF-DD, a ligand of TGF-β receptor II (TGF-βRII), a ligand of TGF-βRIII, a ligand of DNAM1, a ligand of NKp46, a ligand of NKp44, a ligand of NKG2D, a ligand of NKp30, a ligand for a scMHCI, a ligand for a scMHCII, a ligand for a scTCR, a receptor for IL-1, a receptor for IL-2, a receptor for IL-3, a receptor for IL-7, a receptor for IL-8, a receptor for IL-10, a receptor for IL-12, a receptor for IL-15, a receptor for IL-17, a receptor for IL-18, a receptor for IL-21, a receptor for PDGF-DD, a receptor for stem cell factor (SCF), a receptor for stem cell-like tyrosine kinase 3 ligand (FLT3L), a receptor for MICA, a receptor for MICB, a receptor for a ULP16-binding protein, a receptor for CD155, a receptor for CD122, and a receptor for CD28.

[0441] In some embodiments of any of the single-chain chimeric polypeptides described herein, one or more of the first target-binding domain (e.g., any of the exemplary target-binding domains described herein or known in the art), the second target-binding domain (e.g., any of the exemplary target-binding domains described herein or known in the art), and the one or more additional target-binding domains (e.g., any of the exemplary target-binding domains described herein or known in the art) is a soluble interleukin or cytokine protein. Non-limiting examples of soluble interleukin proteins and soluble cytokine proteins include: IL-1, IL-2, IL-3, IL-7, IL-8, IL-10, IL-12, IL-15, IL-17, IL-18, IL-21, PDGF-DD, and SCF.

[0442] In some embodiments of any of the single-chain chimeric polypeptides described herein, one or more of the first target-binding domain (e.g., any of the exemplary target-binding domains described herein or known in the art), the second target-binding domain (e.g., any of the exemplary target-binding domains described herein or known in the art), and the one or more additional target-binding domains (e.g., any of the exemplary target-binding domains described herein or known in the art) is a soluble interleukin or cytokine receptor. Non-limiting examples of soluble interleukin receptors and soluble cytokine receptors include: a soluble TGF-β receptor II (TGF-βRII), a soluble TGF-βRIII, a soluble NKG2D, a soluble NKP30, a soluble NKp44, a soluble NKp46, a soluble DNAM1, a scMHCI, a scMHCII, a scTCR, a soluble CD155, a soluble CD122, a soluble CD3, or a soluble CD28.

[0443] In some embodiments of any of the single-chain chimeric polypeptides described herein, the first target-binding domain (e.g., any of the target-binding domains described herein), the second target-binding domain (e.g., any of the target-binding domains described herein), and the one or more additional target-binding domains (e.g., any of the target-binding domains described herein) can each, independently, bind specifically to a target selected from the group of: CD16a, CD33, CD20, CD19, CD22, CD123, PDL-1, TIGIT, PD-1, TIM3, CTLA4, MICA, MICB, IL-6, IL-8, TNFα, CD26, CD36, ULBP2, CD30, CD200, IGF-1R, MUC4AC, MUC5AC, Trop-2, CMET, EGFR, HER1, HER2, HER3, PSMA, CEA, B7H3, EPCAM, BCMA, P-cadherin, CEACAM5, a UL16-binding protein, HLA-DR, DLL4, TYRO3, AXL, MER, CD122, CD155, PDGF-DD, a ligand of TGF-β receptor II (TGF-βRII), a ligand of TGF-βRIII, a ligand of DNAM1, a ligand of NKp46, a ligand of NKp44, a ligand of NKG2D, a ligand of NKP30, a ligand for a scMHCI, a ligand for a scMHCII, a ligand for a scTCR, a receptor for PDGF-DD, a receptor for stem cell factor (SCF), a receptor for stem cell-like tyrosine kinase 3 ligand (FLT3L), a receptor for MICA, a receptor for MICB, a receptor for a ULP16-binding protein, a receptor for CD155, and a receptor for CD122.

[0444] In some embodiments of any of the single-chain chimeric polypeptides described herein, one or more of the first target-binding domain (e.g., any of the exemplary target-binding domains described herein or known in the art), the second target-binding domain (e.g., any of the exemplary target-binding domains described herein or known in the art), and the one or more additional target-binding domains (e.g., any of the exemplary target-binding domains described herein or known in the art) is a soluble interleukin or cytokine protein. In some embodiments of any of the multi-chain chimeric polypeptides described herein, the soluble interleukin or cytokine protein is selected from the group of: IL-1, IL-2, IL-3, IL-7, IL-8, IL-10, IL-12, IL-15, IL-17, IL-18, IL-21, PDGF-DD, and SCF.

[0445] In some embodiments of any of the single-chain chimeric polypeptides described herein, one or more of the first target-binding domain (e.g., any of the exemplary target-binding domains described herein or known in the art), the second target-binding domain (e.g., any of the exemplary target-binding domains described herein or known in the art), and the one or more additional target-binding domains (e.g., any of the exemplary target-binding domains described herein or known in the art) is a soluble interleukin or cytokine receptor. In some embodiments of any of the multi-chain chimeric polypeptides described herein, the soluble receptor is a soluble TGF-β receptor II (TGF-βRII) a soluble TGF-βRIII, a soluble receptor for TNFα, a soluble receptor for IL-4, or a soluble receptor for IL-10.

### Multi-Chain Chimeric Polypeptides—Type A

[0446] Non-limiting examples of NK cell activating agents are multi-chain chimeric polypeptides that include: (a) a first chimeric polypeptide including: (i) a first target-binding domain; (ii) a soluble tissue factor domain; and (iii) a first domain of a pair of affinity domains; and (b) a second chimeric polypeptide including: (i) a second domain of a pair of affinity domains; and (ii) a second target-binding domain, where the first chimeric polypeptide and the second chimeric polypeptide associate through the binding of the first domain and the second domain of the pair of affinity domains.

[0447] In some examples of any of the multi-chain chimeric polypeptides described herein the total length of first chimeric polypeptide and/or the second chimeric polypeptide can each independently be about 50 amino acids to about 3000 amino acids, about 50 amino acids to about 2500 amino acids, about 50 amino acids to about 2000 amino acids, about 50 amino acids to about 1500 amino acids, about 50 amino acids to about 1000 amino acids, about 50 amino acids to about 950 amino acids, about 50 amino acids to about 900 amino acids, about 50 amino acids to about 850 amino acids, about 50 amino acids to about 800 amino acids, about 50 amino acids to about 750 amino acids, about 50 amino acids to about 700 amino acids, about 50 amino acids to about 650 amino acids, about 50 amino acids to about 600 amino acids, about 50 amino acids to about 550 amino acids, about 50 amino acids to about 500 amino acids, about 50 amino acids to about 480 amino acids, about 50 amino acids to about 460 amino acids, about 50 amino acids to about 440 amino acids, about 50 amino acids to about 420 amino acids, about 50 amino acids to about 400 amino acids, about 50 amino acids to about 380 amino acids, about 50 amino acids to about 360 amino acids, about 50 amino acids to about 340 amino acids, about 50 amino acids to about 320 amino acids, about 50 amino acids to about 300 amino acids, about 50 amino acids to about 280 amino acids, about 50 amino acids to about 260 amino acids, about 50 amino acids to about 240 amino acids, about 50 amino acids to about 220 amino acids, about 50 amino acids to about 200 amino acids, about 50 amino acids to about 150 amino acids, about 50 amino acids to about 100 amino acids, about 100 amino acids to about 3000 amino acids, about 100 amino acids to about 2500 amino acids, about 100 amino acids to about 2000 amino acids, about 100 amino acids to about 1500 amino acids, about 100 amino acids to about 1000 amino acids, about 100 amino acids to about 950 amino acids, about 100 amino acids to about 900 amino acids, about 100 amino acids to about 850 amino acids, about 100 amino acids to about 800 amino acids, about 100 amino acids to about 750 amino acids, about 100 amino acids to about 700 amino acids, about 100 amino acids to about 650 amino acids, about 100 amino acids to about 600 amino acids, about 100 amino acids to about 550 amino acids, about 100 amino acids to about 500 amino acids, about 100 amino acids to about 480 amino acids, about 100 amino acids to about 460 amino acids, about 100 amino acids to about 440 amino acids, about 100 amino acids to about 420 amino acids, about 100 amino acids to about 400 amino acids, about 100 amino acids to about 380 amino acids, about 100 amino acids to about 360 amino acids, about 100 amino acids to about 340 amino acids, about 100 amino acids to about 320 amino acids, about 100 amino acids to about 300 amino acids, about 100 amino acids to about 280 amino acids, about 100 amino acids to about 260 amino acids, about 100 amino acids to about 240 amino acids, about 100 amino acids to about 220 amino acids, about 100 amino acids to about 200 amino acids, about 100 amino acids to about 150 amino acids, about 150 amino acids to about 3000 amino acids, about 150 amino acids to about 2500 amino acids, about 150 amino acids to about 2000 amino acids, about 150 amino acids to about 1500 amino acids, about 150 amino acids to about 1000 amino acids, about 150 amino acids to about 950 amino acids, about 150 amino acids to about 900 amino acids, about 150 amino acids to about 850 amino acids, about 150 amino acids to about 800 amino acids, about 150 amino acids to about 750 amino acids, about 150 amino acids to about 700 amino acids, about 150 amino acids to about 650 amino acids, about 150 amino acids to about 600 amino acids, about 150 amino acids to about 550 amino acids, about 150 amino acids to about 500 amino acids, about 150 amino acids to about 480 amino acids, about 150 amino acids to about 460 amino acids, about 150 amino acids to about 440 amino acids, about 150 amino acids to about 420 amino acids, about 150 amino acids to about 400 amino acids, about 150 amino acids to about 380 amino acids, about 150 amino acids to about 360 amino acids, about 150 amino acids to about 340 amino acids, about 150 amino acids to about 320 amino acids, about 150 amino acids to about 300 amino acids, about 150 amino acids to about 280 amino acids, about 150 amino acids to about 260 amino acids, about 150 amino acids to about 240 amino acids, about 150 amino acids to about 220 amino acids, about 150 amino acids to about 200 amino acids, about 200 amino acids to about 3000 amino acids, about 200 amino acids to about 2500 amino acids, about 200 amino acids to about 2000 amino acids, about 200 amino acids to about 1500 amino acids, about 200 amino acids to about 1000 amino acids, about 200 amino acids to about 950 amino acids, about 200 amino acids to about 900 amino acids, about 200 amino acids to about 850 amino acids, about 200 amino acids to about 800 amino acids, about 200 amino acids to about 750 amino acids, about 200 amino acids to about 700 amino acids, about 200 amino acids to about 650 amino acids, about 200 amino acids to about 600 amino acids, about 200 amino acids to about 550 amino acids, about 200 amino acids to about 500 amino acids, about 200 amino acids to about 480 amino acids, about 200 amino acids to about 460 amino acids, about 200 amino acids to about 440 amino acids, about 200 amino acids to about 420 amino acids, about 200 amino acids to about 400 amino acids, about 200 amino acids to about 380 amino acids, about 200 amino acids to about 360 amino acids, about 200 amino acids to about 340 amino acids, about 200 amino acids to about 320 amino acids, about 200 amino acids to about 300 amino acids, about 200 amino acids to about 280 amino acids, about 200 amino acids to about 260 amino acids, about 200 amino acids to about 240 amino acids, about 200 amino acids to about 220 amino acids, about 220 amino acids to about 3000 amino acids, about 220 amino acids to about 2500 amino acids, about 220 amino acids to about 2000 amino acids, about 220 amino acids to about 1500 amino acids, about 220 amino acids to about 1000 amino acids, about 220 amino acids to about 950 amino acids, about 220 amino acids to about 900 amino acids, about 220 amino acids to about 850 amino acids, about 220 amino acids to about 800 amino acids, about 220 amino acids to about 750 amino acids, about 220 amino acids to about 700 amino acids, about 220 amino acids to about 650 amino acids, about 220 amino acids to about 600 amino acids, about 220 amino acids to about 550 amino acids, about 220 amino acids to about 500 amino acids, about 220 amino acids to about 480 amino acids, about 220 amino acids to about 460 amino acids, about 220 amino acids to about 440 amino acids, about 220 amino acids to about 420 amino acids, about 220 amino acids to about 400 amino acids, about 220 amino acids to about 380 amino acids, about 220 amino acids to about 360 amino acids, about 220 amino acids to about 340 amino acids, about 220 amino acids to about 320 amino acids, about 220 amino acids to about 300 amino acids, about 220 amino acids to about 280 amino acids, about 220 amino acids to about 260 amino acids, about 220 amino acids to about 240 amino acids, about 240 amino acids to about 3000 amino acids, about 240 amino acids to about 2500 amino acids, about 240 amino acids to about 2000 amino acids, about 240 amino acids to about 1500 amino acids, about 240 amino acids to about 1000 amino acids, about 240 amino acids to about 950 amino acids, about 240 amino acids to about 900 amino acids, about 240 amino acids to about 850 amino acids, about 240 amino acids to about 800 amino acids, about 240 amino acids to about 750 amino acids, about 240 amino acids to about 700 amino acids, about 240 amino acids to about 650 amino acids, about 240 amino acids to about 600 amino acids, about 240 amino acids to about 550 amino acids, about 240 amino acids to about 500 amino acids, about 240 amino acids to about 480 amino acids, about 240 amino acids to about 460 amino acids, about 240 amino acids to about 440 amino acids, about 240 amino acids to about 420 amino acids, about 240 amino acids to about 400 amino acids, about 240 amino acids to about 380 amino acids, about 240 amino acids to about 360 amino acids, about 240 amino acids to about 340 amino acids, about 240 amino acids to about 320 amino acids, about 240 amino acids to about 300 amino acids, about 240 amino acids to about 280 amino acids, about 240 amino acids to about 260 amino acids, about 260 amino acids to about 3000 amino acids, about 260 amino acids to about 2500 amino acids, about 260 amino acids to about 2000 amino acids, about 260 amino acids to about 1500 amino acids, about 260 amino acids to about 1000 amino acids, about 260 amino acids to about 950 amino acids, about 260 amino acids to about 900 amino acids, about 260 amino acids to about 850 amino acids, about 260 amino acids to about 800 amino acids, about 260 amino acids to about 750 amino acids, about 260 amino acids to about 700 amino acids, about 260 amino acids to about 650 amino acids, about 260 amino acids to about 600 amino acids, about 260 amino acids to about 550 amino acids, about 260 amino acids to about 500 amino acids, about 260 amino acids to about 480 amino acids, about 260 amino acids to about 460 amino acids, about 260 amino acids to about 440 amino acids, about 260 amino acids to about 420 amino acids, about 260 amino acids to about 400 amino acids, about 260 amino acids to about 380 amino acids, about 260 amino acids to about 360 amino acids, about 260 amino acids to about 340 amino acids, about 260 amino acids to about 320 amino acids, about 260 amino acids to about 300 amino acids, about 260 amino acids to about 280 amino acids, about 280 amino acids to about 3000 amino acids, about 280 amino acids to about 2500 amino acids, about 280 amino acids to about 2000 amino acids, about 280 amino acids to about 1500 amino acids, about 280 amino acids to about 1000 amino acids, about 280 amino acids to about 950 amino acids, about 280 amino acids to about 900 amino acids, about 280 amino acids to about 850 amino acids, about 280 amino acids to about 800 amino acids, about 280 amino acids to about 750 amino acids, about 280 amino acids to about 700 amino acids, about 280 amino acids to about 650 amino acids, about 280 amino acids to about 600 amino acids, about 280 amino acids to about 550 amino acids, about 280 amino acids to about 500 amino acids, about 280 amino acids to about 480 amino acids, about 280 amino acids to about 460 amino acids, about 280 amino acids to about 440 amino acids, about 280 amino acids to about 420 amino acids, about 280 amino acids to about 400 amino acids, about 280 amino acids to about 380 amino acids, about 280 amino acids to about 360 amino acids, about 280 amino acids to about 340 amino acids, about 280 amino acids to about 320 amino acids, about 280 amino acids to about 300 amino acids, about 300 amino acids to about 3000 amino acids, about 300 amino acids to about 2500 amino acids, about 300 amino acids to about 2000 amino acids, about 300 amino acids to about 1500 amino acids, about 300 amino acids to about 1000 amino acids, about 300 amino acids to about 950 amino acids, about 300 amino acids to about 900 amino acids, about 300 amino acids to about 850 amino acids, about 300 amino acids to about 800 amino acids, about 300 amino acids to about 750 amino acids, about 300 amino acids to about 700 amino acids, about 300 amino acids to about 650 amino acids, about 300 amino acids to about 600 amino acids, about 300 amino acids to about 550 amino acids, about 300 amino acids to about 500 amino acids, about 300 amino acids to about 480 amino acids, about 300 amino acids to about 460 amino acids, about 300 amino acids to about 440 amino acids, about 300 amino acids to about 420 amino acids, about 300 amino acids to about 400 amino acids, about 300 amino acids to about 380 amino acids, about 300 amino acids to about 360 amino acids, about 300 amino acids to about 340 amino acids, about 300 amino acids to about 320 amino acids, about 320 amino acids to about 3000 amino acids, about 320 amino acids to about 2500 amino acids, about 320 amino acids to about 2000 amino acids, about 320 amino acids to about 1500 amino acids, about 320 amino acids to about 1000 amino acids, about 320 amino acids to about 950 amino acids, about 320 amino acids to about 900 amino acids, about 320 amino acids to about 850 amino acids, about 320 amino acids to about 800 amino acids, about 320 amino acids to about 750 amino acids, about 320 amino acids to about 700 amino acids, about 320 amino acids to about 650 amino acids, about 320 amino acids to about 600 amino acids, about 320 amino acids to about 550 amino acids, about 320 amino acids to about 500 amino acids, about 320 amino acids to about 480 amino acids, about 320 amino acids to about 460 amino acids, about 320 amino acids to about 440 amino acids, about 320 amino acids to about 420 amino acids, about 320 amino acids to about 400 amino acids, about 320 amino acids to about 380 amino acids, about 320 amino acids to about 360 amino acids, about 320 amino acids to about 340 amino acids, about 340 amino acids to about 3000 amino acids, about 340 amino acids to about 2500 amino acids, about 340 amino acids to about 2000 amino acids, about 340 amino acids to about 1500 amino acids, about 340 amino acids to about 1000 amino acids, about 340 amino acids to about 950 amino acids, about 340 amino acids to about 900 amino acids, about 340 amino acids to about 850 amino acids, about 340 amino acids to about 800 amino acids, about 340 amino acids to about 750 amino acids, about 340 amino acids to about 700 amino acids, about 340 amino acids to about 650 amino acids, about 340 amino acids to about 600 amino acids, about 340 amino acids to about 550 amino acids, about 340 amino acids to about 500 amino acids, about 340 amino acids to about 480 amino acids, about 340 amino acids to about 460 amino acids, about 340 amino acids to about 440 amino acids, about 340 amino acids to about 420 amino acids, about 340 amino acids to about 400 amino acids, about 340 amino acids to about 380 amino acids, about 340 amino acids to about 360 amino acids, about 360 amino acids to about 3000 amino acids, about 360 amino acids to about 2500 amino acids, about 360 amino acids to about 2000 amino acids, about 360 amino acids to about 1500 amino acids, about 360 amino acids to about 1000 amino acids, about 360 amino acids to about 950 amino acids, about 360 amino acids to about 900 amino acids, about 360 amino acids to about 850 amino acids, about 360 amino acids to about 800 amino acids, about 360 amino acids to about 750 amino acids, about 360 amino acids to about 700 amino acids, about 360 amino acids to about 650 amino acids, about 360 amino acids to about 600 amino acids, about 360 amino acids to about 550 amino acids, about 360 amino acids to about 500 amino acids, about 360 amino acids to about 480 amino acids, about 360 amino acids to about 460 amino acids, about 360 amino acids to about 440 amino acids, about 360 amino acids to about 420 amino acids, about 360 amino acids to about 400 amino acids, about 360 amino acids to about 380 amino acids, about 380 amino acids to about 3000 amino acids, about 380 amino acids to about 2500 amino acids, about 380 amino acids to about 2000 amino acids, about 380 amino acids to about 1500 amino acids, about 380 amino acids to about 1000 amino acids, about 380 amino acids to about 950 amino acids, about 380 amino acids to about 900 amino acids, about 380 amino acids to about 850 amino acids, about 380 amino acids to about 800 amino acids, about 380 amino acids to about 750 amino acids, about 380 amino acids to about 700 amino acids, about 380 amino acids to about 650 amino acids, about 380 amino acids to about 600 amino acids, about 380 amino acids to about 550 amino acids, about 380 amino acids to about 500 amino acids, about 380 amino acids to about 480 amino acids, about 380 amino acids to about 460 amino acids, about 380 amino acids to about 440 amino acids, about 380 amino acids to about 420 amino acids, about 380 amino acids to about 400 amino acids, about 400 amino acids to about 3000 amino acids, about 400 amino acids to about 2500 amino acids, about 400 amino acids to about 2000 amino acids, about 400 amino acids to about 1500 amino acids, about 400 amino acids to about 1000 amino acids, about 400 amino acids to about 950 amino acids, about 400 amino acids to about 900 amino acids, about 400 amino acids to about 850 amino acids, about 400 amino acids to about 800 amino acids, about 400 amino acids to about 750 amino acids, about 400 amino acids to about 700 amino acids, about 400 amino acids to about 650 amino acids, about 400 amino acids to about 600 amino acids, about 400 amino acids to about 550 amino acids, about 400 amino acids to about 500 amino acids, about 400 amino acids to about 480 amino acids, about 400 amino acids to about 460 amino acids, about 400 amino acids to about 440 amino acids, about 400 amino acids to about 420 amino acids, about 420 amino acids to about 3000 amino acids, about 420 amino acids to about 2500 amino acids, about 420 amino acids to about 2000 amino acids, about 420 amino acids to about 1500 amino acids, about 420 amino acids to about 1000 amino acids, about 420 amino acids to about 950 amino acids, about 420 amino acids to about 900 amino acids, about 420 amino acids to about 850 amino acids, about 420 amino acids to about 800 amino acids, about 420 amino acids to about 750 amino acids, about 420 amino acids to about 700 amino acids, about 420 amino acids to about 650 amino acids, about 420 amino acids to about 600 amino acids, about 420 amino acids to about 550 amino acids, about 420 amino acids to about 500 amino acids, about 420 amino acids to about 480 amino acids, about 420 amino acids to about 460 amino acids, about 420 amino acids to about 440 amino acids, about 440 amino acids to about 3000 amino acids, about 440 amino acids to about 2500 amino acids, about 440 amino acids to about 2000 amino acids, about 440 amino acids to about 1500 amino acids, about 440 amino acids to about 1000 amino acids, about 440 amino acids to about 950 amino acids, about 440 amino acids to about 900 amino acids, about 440 amino acids to about 850 amino acids, about 440 amino acids to about 800 amino acids, about 440 amino acids to about 750 amino acids, about 440 amino acids to about 700 amino acids, about 440 amino acids to about 650 amino acids, about 440 amino acids to about 600 amino acids, about 440 amino acids to about 550 amino acids, about 440 amino acids to about 500 amino acids, about 440 amino acids to about 480 amino acids, about 440 amino acids to about 460 amino acids, about 460 amino acids to about 3000 amino acids, about 460 amino acids to about 2500 amino acids, about 460 amino acids to about 2000 amino acids, about 460 amino acids to about 1500 amino acids, about 460 amino acids to about 1000 amino acids, about 460 amino acids to about 950 amino acids, about 460 amino acids to about 900 amino acids, about 460 amino acids to about 850 amino acids, about 460 amino acids to about 800 amino acids, about 460 amino acids to about 750 amino acids, about 460 amino acids to about 700 amino acids, about 460 amino acids to about 650 amino acids, about 460 amino acids to about 600 amino acids, about 460 amino acids to about 550 amino acids, about 460 amino acids to about 500 amino acids, about 460 amino acids to about 480 amino acids, about 480 amino acids to about 3000 amino acids, about 480 amino acids to about 2500 amino acids, about 480 amino acids to about 2000 amino acids, about 480 amino acids to about 1500 amino acids, about 480 amino acids to about 1000 amino acids, about 480 amino acids to about 950 amino acids, about 480 amino acids to about 900 amino acids, about 480 amino acids to about 850 amino acids, about 480 amino acids to about 800 amino acids, about 480 amino acids to about 750 amino acids, about 480 amino acids to about 700 amino acids, about 480 amino acids to about 650 amino acids, about 480 amino acids to about 600 amino acids, about 480 amino acids to about 550 amino acids, about 480 amino acids to about 500 amino acids, about 500 amino acids to about 3000 amino acids, about 500 amino acids to about 2500 amino acids, about 500 amino acids to about 2000 amino acids, about 500 amino acids to about 1500 amino acids, about 500 amino acids to about 1000 amino acids, about 500 amino acids to about 950 amino acids, about 500 amino acids to about 900 amino acids, about 500 amino acids to about 850 amino acids, about 500 amino acids to about 800 amino acids, about 500 amino acids to about 750 amino acids, about 500 amino acids to about 700 amino acids, about 500 amino acids to about 650 amino acids, about 500 amino acids to about 600 amino acids, about 500 amino acids to about 550 amino acids, about 550 amino acids to about 3000 amino acids, about 550 amino acids to about 2500 amino acids, about 550 amino acids to about 2000 amino acids, about 550 amino acids to about 1500 amino acids, about 550 amino acids to about 1000 amino acids, about 550 amino acids to about 950 amino acids, about 550 amino acids to about 900 amino acids, about 550 amino acids to about 850 amino acids, about 550 amino acids to about 800 amino acids, about 550 amino acids to about 750 amino acids, about 550 amino acids to about 700 amino acids, about 550 amino acids to about 650 amino acids, about 550 amino acids to about 600 amino acids, about 600 amino acids to about 3000 amino acids, about 600 amino acids to about 2500 amino acids, about 600 amino acids to about 2000 amino acids, about 600 amino acids to about 1500 amino acids, about 600 amino acids to about 1000 amino acids, about 600 amino acids to about 950 amino acids, about 600 amino acids to about 900 amino acids, about 600 amino acids to about 850 amino acids, about 600 amino acids to about 800 amino acids, about 600 amino acids to about 750 amino acids, about 600 amino acids to about 700 amino acids, about 600 amino acids to about 650 amino acids, about 650 amino acids to about 3000 amino acids, about 650 amino acids to about 2500 amino acids, about 650 amino acids to about 2000 amino acids, about 650 amino acids to about 1500 amino acids, about 650 amino acids to about 1000 amino acids, about 650 amino acids to about 950 amino acids, about 650 amino acids to about 900 amino acids, about 650 amino acids to about 850 amino acids, about 650 amino acids to about 800 amino acids, about 650 amino acids to about 750 amino acids, about 650 amino acids to about 700 amino acids, about 700 amino acids to about 3000 amino acids, about 700 amino acids to about 2500 amino acids, about 700 amino acids to about 2000 amino acids, about 700 amino acids to about 1500 amino acids, about 700 amino acids to about 1000 amino acids, about 700 amino acids to about 950 amino acids, about 700 amino acids to about 900 amino acids, about 700 amino acids to about 850 amino acids, about 700 amino acids to about 800 amino acids, about 700 amino acids to about 750 amino acids, about 750 amino acids to about 3000 amino acids, about 750 amino acids to about 2500 amino acids, about 750 amino acids to about 2000 amino acids, about 750 amino acids to about 1500 amino acids, about 750 amino acids to about 1000 amino acids, about 750 amino acids to about 950 amino acids, about 750 amino acids to about 900 amino acids, about 750 amino acids to about 850 amino acids, about 750 amino acids to about 800 amino acids, about 800 amino acids to about 3000 amino acids, about 800 amino acids to about 2500 amino acids, about 800 amino acids to about 2000 amino acids, about 800 amino acids to about 1500 amino acids, about 800 amino acids to about 1000 amino acids, about 800 amino acids to about 950 amino acids, about 800 amino acids to about 900 amino acids, about 800 amino acids to about 850 amino acids, about 850 amino acids to about 3000 amino acids, about 850 amino acids to about 2500 amino acids, about 850 amino acids to about 2000 amino acids, about 850 amino acids to about 1500 amino acids, about 850 amino acids to about 1000 amino acids, about 850 amino acids to about 950 amino acids, about 850 amino acids to about 900 amino acids, about 900 amino acids to about 3000 amino acids, about 900 amino acids to about 2500 amino acids, about 900 amino acids to about 2000 amino acids, about 900 amino acids to about 1500 amino acids, about 900 amino acids to about 1000 amino acids, about 900 amino acids to about 950 amino acids, about 950 amino acids to about 3000 amino acids, about 950 amino acids to about 2500 amino acids, about 950 amino acids to about 2000 amino acids, about 950 amino acids to about 1500 amino acids, about 950 amino acids to about 1000 amino acids, about 1000 amino acids to about 3000 amino acids, about 1000 amino acids to about 2500 amino acids, about 1000 amino acids to about 2000 amino acids, about 1000 amino acids to about 1500 amino acids, about 1500 amino acids to about 3000 amino acids, about 1500 amino acids to about 2500 amino acids, about 1500 amino acids to about 2000 amino acids, about 2000 amino acids to about 3000 amino acids, about 2000 amino acids to about 2500 amino acids, or about 2500 amino acids to about 3000 amino acids.

[0448] In some embodiments of any of the multi-chain chimeric polypeptides described herein, the first target-binding domain (e.g., any of the first target-binding domains described herein) and the soluble tissue factor domain (e.g., any of the exemplary soluble tissue factor domains described herein) directly abut each other in the first chimeric polypeptide. In some embodiments of any of the multi-chain chimeric polypeptides described herein, the first chimeric polypeptide further comprises a linker sequence (e.g., any of the exemplary linker sequences described herein or known in the art) between the first target-binding domain (e.g., any of the exemplary first target-binding domains described herein) and the soluble tissue factor domain (e.g., any of the exemplary soluble tissue factor domains described herein) in the first chimeric polypeptide.

[0449] In some embodiments of any of the multi-chain chimeric polypeptides described herein, the soluble tissue factor domain (e.g., any of the exemplary soluble tissue factor domains described herein) and the first domain of the pair of affinity domains (e.g., any of the exemplary first domains of any of the exemplary pairs of affinity domains described herein) directly abut each other in the first chimeric polypeptide. In some embodiments of any of the multi-chain chimeric polypeptides described herein, the first chimeric polypeptide further comprises a linker sequence (e.g., any of the exemplary linker sequences described herein or known in the art) between the soluble tissue factor domain (e.g., any of the exemplary soluble tissue factor domains described herein) and the first domain of the pair of affinity domains (e.g., any of the exemplary first domains of any of the exemplary pairs of affinity domains described herein) in the first chimeric polypeptide.

[0450] In some embodiments of any of the multi-chain chimeric polypeptides described herein, the second domain of the pair of affinity domains (e.g., any of the exemplary second domains of any of the exemplary pairs of affinity domains described herein) and the second target-binding domain (e.g., any of the exemplary second target-binding domains described herein) directly abut each other in the second chimeric polypeptide. In some embodiments of any of the multi-chain chimeric polypeptides described herein, the second chimeric polypeptide further comprises a linker sequence (e.g., any of the exemplary linker sequences described herein or known in the art) between the second domain of the pair of affinity domains (e.g., any of the exemplary second domains of any of the exemplary pairs of affinity domains described herein) and the second target-binding domain (e.g., any of the exemplary second target-binding domains described herein) in the second chimeric polypeptide.

[0451] In some embodiments of any of the multi-chain chimeric polypeptides, the first chimeric polypeptide further includes one or more (e.g., two, three, four, five, six, seven, eight, nine, or ten) additional target-binding domain(s) (e.g., any of the exemplary target-binding domains described herein or known in the art), where at least one of the one or more additional antigen-binding domain(s) is positioned between the soluble tissue factor domain (e.g., any of the exemplary soluble tissue factor domains described herein or known in the art) and the first domain of the pair of affinity domains (e.g., any of the exemplary first domains of any of the exemplary pairs of affinity domains described herein). In some embodiments, the first chimeric polypeptide can further include a linker sequence (e.g., any of the exemplary linker sequences described herein or known in the art) between the soluble tissue factor domain (e.g., any of the exemplary soluble tissue factor domains described herein) and the at least one of the one or more additional target-binding domain(s) (e.g., any of the exemplary target-binding domains described herein or known in the art), and/or a linker sequence (e.g., any of the exemplary linker sequences described herein or known in the art) between the at least one of the one or more additional target-binding domain(s) (e.g., any of the exemplary target-binding domains described herein or known in the art) and the first domain of the pair of affinity domains (e.g., any of the exemplary first domains described herein of any of the exemplary pairs of affinity domains described herein).

[0452] In some embodiments of any of the multi-chain chimeric polypeptides described herein, the first chimeric polypeptide further includes one or more (e.g., two, three, four, five, six, seven, eight, nine, or ten) additional target-binding domains at the N-terminal and/or C-terminal end of the first chimeric polypeptide. In some embodiments, at least one of the one or more additional target-binding domains (e.g., any of the exemplary target-binding domains described herein or known in the art) directly abuts the first domain of the pair of affinity domains (e.g., any of the exemplary first domains described herein of any of the exemplary pairs of affinity domains described herein) in the first chimeric polypeptide. In some embodiments, the first chimeric polypeptide further includes a linker sequence (e.g., any of the exemplary linker sequences described herein or known in the art) between the at least one of the one or more additional target-binding domains (e.g., any of the exemplary target-binding domains described herein or known in the art) and the first domain of the pair of affinity domains (e.g., any of the exemplary first domains described herein of any of the exemplary pairs of affinity domains described herein). In some embodiments, the at least one of the one or more additional target-binding domains (e.g., any of the exemplary target-binding domains described herein or known in the art) directly abuts the first target-binding domain (e.g., any of the exemplary target-binding domains described herein or known in the art) in the first chimeric polypeptide. In some embodiments, the first chimeric polypeptide further comprises a linker sequence (e.g., any of the exemplary linker sequences described herein or known in the art) between the at least one of the one or more additional target-binding domains (e.g., any of the exemplary target-binding domains described herein or known in the art) and the first target-binding domain (e.g., any of the exemplary target-binding domains described herein or known in the art).

[0453] In some embodiments of any of the multi-chain chimeric polypeptides described herein, at least one of the one or more additional target-binding domains (e.g., any of the exemplary target-binding domains described herein or known in the art) is disposed at the N- and/or C-terminus of the first chimeric polypeptide, and at least one of the one or more additional target-binding domains (e.g., any of the exemplary target-binding domains described herein or known in the art) is positioned between the soluble tissue factor domain (e.g., any of the exemplary soluble tissue factor domains described herein or known in the art) and the first domain of the pair of affinity domains (e.g., any of the exemplary first domains of any of the exemplary pairs of affinity domains described herein) in the first chimeric polypeptide. In some embodiments, the at least one additional target-binding domain (e.g., any of the exemplary target-binding domains described herein or known in the art) of the one or more additional target-binding domains disposed at the N-terminus directly abuts the first target-binding domain (e.g., any of the exemplary target-binding domains described herein or known in the art) or the first domain of the pair of affinity domains (e.g., any of the exemplary first domains described herein of any of the exemplary pairs of affinity domains described herein) in the first chimeric polypeptide. In some embodiments, the first chimeric polypeptide further comprises a linker sequence (e.g., any of the linker sequences described herein or known in the art) disposed between the at least one additional target-binding domain (e.g., any of the exemplary target-binding domains described herein or known in the art) and the first target-binding domain (e.g., any of the exemplary target-binding domains described herein or known in the art) or the first domain of the pair of affinity domains (e.g., any of the exemplary first domains described herein of any of the exemplary pairs of affinity domains described herein) in the first chimeric polypeptide. In some embodiments, the at least one additional target-binding domain (e.g., any of the exemplary target-binding domains described herein or known in the art) of the one or more additional target-binding domains disposed at the C-terminus directly abuts the first target-binding domain (e.g., any of the exemplary target-binding domains described herein or known in the art) or the first domain of the pair of affinity domains (e.g., any of the exemplary first domains of any of the exemplary pairs of affinity domains described herein) in the first chimeric polypeptide. In some embodiments, the first chimeric polypeptide further includes a linker sequence (e.g., any of the exemplary linker sequences described herein or known in the art) disposed between the at least one additional target-binding domain (e.g., any of the exemplary target-binding domains described herein or known in the art) and the first target-binding domain (e.g., any of the exemplary target-binding domains described herein or known in the art) or the first domain of the pair of affinity domains (e.g., any of the exemplary first domains described herein of any of the exemplary pairs of affinity domains described herein) in the first chimeric polypeptide. In some embodiments, the at least one of the one or more additional target-binding domains (e.g., any of the exemplary target-binding domains described herein or known in the art) positioned between the soluble tissue factor domain (e.g., any of the exemplary soluble tissue factor domains described herein) and the first domain of the pair of affinity domains (e.g., any of the first domains described herein or any of the exemplary pairs of affinity domains described herein), directly abuts the soluble tissue factor domain and/or the first domain of the pair of affinity domains. In some embodiments, the first chimeric polypeptide further comprises a linker sequence (e.g., any of the exemplary linker sequences described herein or known in the art) disposed (i) between the soluble tissue factor domain (e.g., any of the exemplary soluble tissue factor domains described herein) and the at least one of the one or more additional target-binding domains (e.g., any of the exemplary target-binding domains described herein or known in the art) positioned between the soluble tissue factor domain (e.g., any of the exemplary soluble tissue factor domains described herein) and the first domain of the pair of affinity domains (e.g., any of the exemplary first domains of any of the exemplary pairs of affinity domains described herein), and/or (ii) between the first domain of the pair of affinity domains and the at least one of the one or more additional target-binding domains positioned between the soluble tissue factor domain and the first domain of the pair of affinity domains.

[0454] In some embodiments of any of the multi-chain chimeric polypeptides described herein, the second chimeric polypeptide further includes one or more (e.g., two, three, four, five, six, seven, eight, nine, or ten) additional target-binding domains (e.g., any of the exemplary target-binding domains described herein or known in the art) at the N-terminal end and/or the C-terminal end of the second chimeric polypeptide. In some embodiments, at least one of the one or more additional target-binding domains (e.g., any of the exemplary target-binding domains described herein or known in the art) directly abuts the second domain of the pair of affinity domains (e.g., any of the exemplary second domains of any of the exemplary pairs of affinity domains described herein) in the second chimeric polypeptide. In some embodiments, the second chimeric polypeptide further includes a linker sequence (e.g., any of the exemplary linker sequences described herein or known in the art) between at least one of the one or more additional target-binding domains (e.g., any of the exemplary target-binding domains described herein or known in the art) and the second domain of the pair of affinity domains (e.g., any of the second domains described herein of any of the exemplary pairs of affinity domains described herein) in the second chimeric polypeptide. In some embodiments, at least one of the one or more additional target-binding domains (e.g., any of the exemplary target-binding domains described herein or known in the art) directly abuts the second target-binding domain (e.g., any of the target-binding domains described herein or known in the art) in the second chimeric polypeptide. In some embodiments, the second chimeric polypeptide further includes a linker sequence (e.g., any of the exemplary linker sequences described herein or known in the art) between at least one of the one or more additional target-binding domains (e.g., any of the exemplary target binding domains described herein or known in the art) and the second target-binding domain (e.g., any of the exemplary target binding domains described herein or known in the art) in the second chimeric polypeptide.

[0455] In some embodiments of any of the multi-chain chimeric polypeptides described herein, two or more (e.g., three or more, four or more, five or more, six or more, seven or more, eight or more, nine or more, or ten or more) of the first target-binding domain, the second target-binding domain, and the one or more additional target-binding domains bind specifically to the same antigen. In some embodiments, two or more (e.g., three or more, four or more, five or more, six or more, seven or more, eight or more, nine or more, or ten or more) of the first target-binding domain, the second target-binding domain, and the one or more additional target-binding domains bind specifically to the same epitope. In some embodiments, two or more (e.g., three or more, four or more, five or more, six or more, seven or more, eight or more, nine or more, or ten or more) of the first target-binding domain, the second target-binding domain, and the one or more additional target-binding domains include the same amino acid sequence. In some embodiments, the first target-binding domain, the second target-binding domain, and the one or more additional target-binding domains each bind specifically to the same antigen.

[0456] In some embodiments, the first target-binding domain, the second target-binding domain, and the one or more additional target-binding domains each bind specifically to the same epitope. In some embodiments, the first target-binding domain, the second target-binding domain, and the one or more additional target-binding domains each include the same amino acid sequence.

[0457] In some embodiments of any of the multi-chain chimeric polypeptides described herein, the first target-binding domain, the second target-binding domain, and the one or more additional target-binding domains bind specifically to different antigens. In some embodiments of any of the multi-chain chimeric polypeptides described herein, one or more (e.g., two or more, three or more, four or more, five or more, six or more, seven or more, eight or more, nine or more, or ten or more) of the first target-binding domain, the second target-binding domain, and the one or more additional target-binding domains is an antigen-binding domain. In some embodiments, the first target-binding domain, the second target-binding domain, and the one or more additional target-binding domains are each an antigen-binding domain (e.g., a scFv or a single-domain antibody).

[0458] In some embodiments of any of the multi-chain chimeric polypeptides described herein, one or more (e.g., two, three, four, five, six, seven, eight, nine, or ten) of the first target-binding domain (e.g., any of the exemplary target-binding domains described herein or known in the art), the second target-binding domain (e.g., any of the exemplary target-binding domains described herein or known in the art), and the one or more additional target-binding domains (e.g., any of the exemplary target-binding domains described herein or known in the art) bind specifically to a target selected from the group consisting of: CD16a, CD28, CD3, CD33, CD20, CD19, CD22, CD123, IL-1R, IL-1, VEGF, IL-6R, IL-4, IL-10, PDL-1, TIGIT, PD-1, TIM3, CTLA4, MICA, MICB, IL-6, IL-8, TNFα, CD26, CD36, ULBP2, CD30, CD200, IGF-1R, MUC4AC, MUC5AC, Trop-2, CMET, EGFR, HER1, HER2, HER3, PSMA, CEA, B7H3, EPCAM, BCMA, P-cadherin, CEACAM5, a UL16-binding protein, HLA-DR, DLL4, TYRO3, AXL, MER, CD122, CD155, PDGF-DD, a ligand of TGF-β receptor II (TGF-βRII), a ligand of TGF-βRIII, a ligand of DNAM1, a ligand of NKp46, a ligand of NKp44, a ligand of NKG2D, a ligand of NKP30, a ligand for a scMHCI, a ligand for a scMHCII, a ligand for a scTCR, a receptor for IL-1, a receptor for IL-2, a receptor for IL-3, a receptor for IL-7, a receptor for IL-8, a receptor for IL-10, a receptor for IL-12, a receptor for IL-15, a receptor for IL-17, a receptor for IL-18, a receptor for IL-21, a receptor for PDGF-DD, a receptor for stem cell factor (SCF), a receptor for stem cell-like tyrosine kinase 3 ligand (FLT3L), a receptor for MICA, a receptor for MICB, a receptor for a ULP16-binding protein, a receptor for CD155, a receptor for CD122, and a receptor for CD28.

[0459] In some embodiments of any of the multi-chain chimeric polypeptides described herein, one or more of the first target-binding domain (e.g., any of the exemplary target-binding domains described herein or known in the art), the second target-binding domain (e.g., any of the exemplary target-binding domains described herein or known in the art), and the one or more additional target-binding domains (e.g., any of the exemplary target-binding domains described herein or known in the art) is a soluble interleukin or cytokine protein. Non-limiting examples of soluble interleukin proteins and soluble cytokine proteins include: IL-1, IL-2, IL-3, IL-7, IL-8, IL-10, IL-12, IL-15, IL-17, IL-18, IL-21, PDGF-DD, and SCF.

[0460] In some embodiments of any of the multi-chain chimeric polypeptides described herein, one or more of the first target-binding domain (e.g., any of the exemplary target-binding domains described herein or known in the art), the second target-binding domain (e.g., any of the exemplary target-binding domains described herein or known in the art), and the one or more additional target-binding domains (e.g., any of the exemplary target-binding domains described herein or known in the art) is a soluble interleukin or cytokine receptor. Non-limiting examples of soluble interleukin receptors and soluble cytokine receptors include: a soluble TGF-β receptor II (TGF-βRII), a soluble TGF-βRIII, a soluble NKG2D, a soluble NKP30, a soluble NKp44, a soluble NKp46, a soluble DNAM1, a scMHCI, a scMHCII, a scTCR, a soluble CD155, a soluble CD122, a soluble CD3, or a soluble CD28.

[0461] In some embodiments of any of the multi-chain chimeric polypeptides described herein, the first target-binding domain (e.g., any of the target-binding domains described herein, the second target-binding domain (e.g., any of the target-binding domains described herein), and the one or more additional target-binding domains (e.g., any of the target-binding domains described herein) can each, independently, bind specifically to a target selected from the group of: CD16a, CD33, CD20, CD19, CD22, CD123, PDL-1, TIGIT, PD-1, TIM3, CTLA4, MICA, MICB, IL-6, IL-8, TNFα, CD26, CD36, ULBP2, CD30, CD200, IGF-1R, MUC4AC, MUC5AC, Trop-2, CMET, EGFR, HER1, HER2, HER3, PSMA, CEA, B7H3, EPCAM, BCMA, P-cadherin, CEACAM5, a UL16-binding protein, HLA-DR, DLL4, TYRO3, AXL, MER, CD122, CD155, PDGF-DD, a ligand of TGF-β receptor II (TGF-βRII), a ligand of TGF-βRIII, a ligand of DNAM1, a ligand of NKp46, a ligand of NKp44, a ligand of NKG2D, a ligand of NKp30, a ligand for a scMHCI, a ligand for a scMHCII, a ligand for a scTCR, a receptor for PDGF-DD, a receptor for stem cell factor (SCF), a receptor for stem cell-like tyrosine kinase 3 ligand (FLT3L), a receptor for MICA, a receptor for MICB, a receptor for a ULP16-binding protein, a receptor for CD155, and a receptor for CD122.

[0462] In some embodiments of any of the multi-chain chimeric polypeptides described herein, one or both of the first target-binding domain (e.g., any of the target-binding domains described herein), the second target-binding domain (e.g., any of the target-binding domains described herein), and the one or more additional binding domains (e.g., any of the target-binding described herein) is a soluble interleukin or cytokine protein. In some embodiments of any of the multi-chain chimeric polypeptides described herein, the soluble interleukin or cytokine protein is selected from the group of: IL-1, IL-2, IL-3, IL-7, IL-8, IL-10, IL-12, IL-15, IL-17, IL-18, IL-21, PDGF-DD, and SCF.

[0463] In some embodiments of any of the multi-chain chimeric polypeptides described herein, one or both of the first target-binding domain and the second target-binding domain is a soluble interleukin or cytokine receptor. In some embodiments of any of the multi-chain chimeric polypeptides described herein, the soluble receptor is a soluble TGF-β receptor II (TGF-βRII) a soluble TGF-βRIII, a soluble receptor for TNFα, a soluble receptor for IL-4, or a soluble receptor for IL-10.

### Multi-Chain Chimeric Polypeptides—Type B

[0464] Non-limiting examples of NK cell activating agents are multi-chain chimeric polypeptides that include: (a) a first and second chimeric polypeptide each including: (i) a first target-binding domain; (ii) a Fc domain; and (iii) a first domain of a pair of affinity domains; and (b) a third and fourth chimeric polypeptide each including: (i) a second domain of a pair of affinity domains; and (ii) a second target-binding domain, where the first and second chimeric polypeptides and the third and fourth chimeric polypeptides associate through the binding of the first domain and the second domain of the pair of affinity domains, and the first and second chimeric polypeptides associate through their Fc domains.

[0465] In some embodiments of any of the multi-chain chimeric polypeptides described herein, the first target-binding domain (e.g., any of the first target-binding domains described herein) and the Fc domain (e.g., any of the exemplary Fc domains described herein) directly abut each other in the first and second chimeric polypeptides. In some embodiments of any of the multi-chain chimeric polypeptides described herein, the first and second chimeric polypeptides further comprise a linker sequence (e.g., any of the exemplary linker sequences described herein or known in the art) between the first target-binding domain (e.g., any of the exemplary first target-binding domains described herein) and the Fc domain (e.g., any of the exemplary Fc domains described herein) in the first and second chimeric polypeptides.

[0466] In some embodiments of any of the multi-chain chimeric polypeptides described herein, the Fc domain (e.g., any of the exemplary Fc domains described herein) and the first domain of the pair of affinity domains (e.g., any of the exemplary first domains of any of the exemplary pairs of affinity domains described herein) directly abut each other in the first and second chimeric polypeptide. In some embodiments of any of the multi-chain chimeric polypeptides described herein, the first and second chimeric polypeptide further comprises a linker sequence (e.g., any of the exemplary linker sequences described herein or known in the art) between the Fc domain (e.g., any of the exemplary Fc domains described herein) and the first domain of the pair of affinity domains (e.g., any of the exemplary first domains of any of the exemplary pairs of affinity domains described herein) in the first and second chimeric polypeptide.

[0467] In some embodiments of any of the multi-chain chimeric polypeptides described herein, the second domain of the pair of affinity domains (e.g., any of the exemplary second domains of any of the exemplary pairs of affinity domains described herein) and the second target-binding domain (e.g., any of the exemplary second target-binding domains described herein) directly abut each other in the third and fourth chimeric polypeptide. In some embodiments of any of the multi-chain chimeric polypeptides described herein, the third and fourth chimeric polypeptide further comprise a linker sequence (e.g., any of the exemplary linker sequences described herein or known in the art) between the second domain of the pair of affinity domains (e.g., any of the exemplary second domains of any of the exemplary pairs of affinity domains described herein) and the second target-binding domain (e.g., any of the exemplary second target-binding domains described herein) in the third and fourth chimeric polypeptide.

[0468] In some embodiments of any of the multi-chain chimeric polypeptides described herein, the first target-binding domain and the second target-binding domain bind specifically to the same antigen. In some embodiments of any of the multi-chain chimeric polypeptides described herein, the first target-binding domain and the second target-binding domain bind specifically to the same epitope. In some embodiments of any of the multi-chain chimeric polypeptides described herein, the first target-binding domain and the second target-binding domain include the same amino acid sequence. In some embodiments of any of the multi-chain chimeric polypeptides described herein, the first target-binding domain and the second target-binding domain bind specifically to different antigens. In some embodiments of any of the multi-chain chimeric polypeptides described herein, one or both of the first target-binding domain and the second target-binding domain is an antigen-binding domain (e.g., any of the exemplary second target-binding domains described herein). In some embodiments of any of the multi-chain chimeric polypeptides described herein, the first target-binding domain and the second target-binding domain are each antigen-binding domains (e.g., any of the exemplary second target-binding domains described herein). In some embodiments of any of the multi-chain chimeric polypeptides described herein, the antigen-binding domain (e.g., any of the exemplary second target-binding domains described herein) includes a scFv or a single domain antibody.

[0469] In some embodiments of any of the multi-chain chimeric polypeptides described herein, one or both of the first target-binding domain (e.g., any of the exemplary target-binding domains described herein or known in the art) and the second target-binding domain (e.g., any of the exemplary target-binding domains described herein or known in the art) bind specifically to a target selected from the group consisting of: CD16a, CD28, CD3, CD33, CD20, CD19, CD22, CD123, IL-1R, IL-1, VEGF, IL-6R, IL-4, IL-10, PDL-1, TIGIT, PD-1, TIM3, CTLA4, MICA, MICB, IL-6, IL-8, TNFα, CD26, CD36, ULBP2, CD30, CD200, IGF-1R, MUC4AC, MUC5AC, Trop-2, CMET, EGFR, HER1, HER2, HER3, PSMA, CEA, B7H3, EPCAM, BCMA, P-cadherin, CEACAM5, a UL16-binding protein, HLA-DR, DLL4, TYRO3, AXL, MER, CD122, CD155, PDGF-DD, a ligand of TGF-β receptor II (TGF-βRII), a ligand of TGF-βRIII, a ligand of DNAM1, a ligand of NKp46, a ligand of NKp44, a ligand of NKG2D, a ligand of NKp30, a ligand for a scMHCI, a ligand for a scMHCII, a ligand for a scTCR, a receptor for IL-1, a receptor for IL-2, a receptor for IL-3, a receptor for IL-7, a receptor for IL-8, a receptor for IL-10, a receptor for IL-12, a receptor for IL-15, a receptor for IL-17, a receptor for IL-18, a receptor for IL-21, a receptor for PDGF-DD, a receptor for stem cell factor (SCF), a receptor for stem cell-like tyrosine kinase 3 ligand (FLT3L), a receptor for MICA, a receptor for MICB, a receptor for a ULP16-binding protein, a receptor for CD155, a receptor for CD122, and a receptor for CD28.

[0470] In some embodiments of any of the multi-chain chimeric polypeptides described herein, one or both of the first target-binding domain (e.g., any of the exemplary target-binding domains described herein or known in the art) and the second target-binding domain (e.g., any of the exemplary target-binding domains described herein or known in the art) is a soluble interleukin or cytokine protein. Non-limiting examples of soluble interleukin proteins and soluble cytokine proteins include: IL-1, IL-2, IL-3, IL-7, IL-8, IL-10, IL-12, IL-15, IL-17, IL-18, IL-21, PDGF-DD, and SCF.

[0471] In some embodiments of any of the multi-chain chimeric polypeptides described herein, one or both of the first target-binding domain and the second target-binding domain (e.g., any of the exemplary target-binding domains described herein or known in the art) is a soluble interleukin or cytokine receptor. Non-limiting examples of soluble interleukin receptors and soluble cytokine receptors include: a soluble TGF-β receptor II (TGF-βRII), a soluble TGF-βRIII, a soluble NKG2D, a soluble NKp30, a soluble NKp44, a soluble NKp46, a soluble DNAM1, a scMHCI, a scMHCII, a scTCR, a soluble CD155, a soluble CD122, a soluble CD3, or a soluble CD28.

[0472] In some embodiments of any of the multi-chain chimeric polypeptides described herein, the first target-binding domain and the second target-binding domain can each, independently, bind specifically to a target selected from the group of: CD16a, CD33, CD20, CD19, CD22, CD123, PDL-1, TIGIT, PD-1, TIM3, CTLA4, MICA, MICB, IL-6, IL-8, TNFα, CD26, CD36, ULBP2, CD30, CD200, IGF-1R, MUC4AC, MUC5AC, Trop-2, CMET, EGFR, HER1, HER2, HER3, PSMA, CEA, B7H3, EPCAM, BCMA, P-cadherin, CEACAM5, a UL16-binding protein, HLA-DR, DLL4, TYRO3, AXL, MER, CD122, CD155, PDGF-DD, a ligand of TGF-β receptor II (TGF-βRII), a ligand of TGF-βRIII, a ligand of DNAM1, a ligand of NKp46, a ligand of NKp44, a ligand of NKG2D, a ligand of NKp30, a ligand for a scMHCI, a ligand for a scMHCII, a ligand for a scTCR, a receptor for PDGF-DD, a receptor for stem cell factor (SCF), a receptor for stem cell-like tyrosine kinase 3 ligand (FLT3L), a receptor for MICA, a receptor for MICB, a receptor for a ULP16-binding protein, a receptor for CD155, and a receptor for CD122.

[0473] In some embodiments of any of the multi-chain chimeric polypeptides described herein, one or both of the first target-binding domain and the second target-binding domain is a soluble interleukin or cytokine protein. In some embodiments of any of the multi-chain chimeric polypeptides described herein, the soluble interleukin or cytokine protein is selected from the group of: IL-1, IL-2, IL-3, IL-7, IL-8, IL-10, IL-12, IL-15, IL-17, IL-18, IL-21, PDGF-DD, and SCF.

[0474] In some embodiments of any of the multi-chain chimeric polypeptides described herein, one or both of the first target-binding domain and the second target-binding domain is a soluble interleukin or cytokine receptor. In some embodiments of any of the multi-chain chimeric polypeptides described herein, the soluble receptor is a soluble TGF-β receptor II (TGF-βRII) a soluble TGF-βRIII, a soluble receptor for TNFα, a soluble receptor for IL-4, or a soluble receptor for IL-10.

### Tissue Factor

[0475] Human tissue factor is a 263 amino-acid transmembrane protein containing three domains: (1) a 219-amino acid N-terminal extracellular domain (residues 1-219); (2) a 22-amino acid transmembrane domain (residues 220-242); and (3) a 21-amino acid cytoplasmic C-terminal tail (residues 242-263) ((UniProtKB Identifier Number: P13726). The cytoplasmic tail contains two phosphorylation sites at Ser253 and Ser258, and one S-palmitoylation site at Cys245. Deletion or mutation of the cytoplasmic domain was not found to affect tissue factor coagulation activity. Tissue factor has one S-palmitoylation site in the intracellular domain of the protein at Cys245. The Cys245 is located at the amino acid terminus of the intracellular domain and close to the membrane surface. The tissue factor transmembrane domain is composed of a single-spanning α-helix.

[0476] The extracellular domain of tissue factor, composed of two fibronectin type III domains, is connected to the transmembrane domain through a six-amino acid linker. This linker provides conformational flexibility to decouple the tissue factor extracellular domain from its transmembrane and cytoplasmic domains. Each tissue factor fibronectin type III module is composed of two overlapping β sheets with the top sheet domain containing three antiparallel β-strands and the bottom sheet containing four β-strands. The β-strands are connected by β-loops between strand βA and βB, βC and βD, and PE and βF, all of which are conserved in conformation in the two modules. There are three short α-helix segments connecting the β-strands. A unique feature of tissue factor is a 17-amino acid β-hairpin between strand β10 and strand β11, which is not a common element of the fibronectin superfamily. The N-terminal domain also contains a 12 amino acid loop between β6F and β7G that is not present in the C-terminal domain and is unique to tissue factor. Such a fibronectin type III domain structure is a feature of the immunoglobulin-like family of protein folds and is conserved among a wide variety of extracellular proteins.

[0477] The zymogen FVII is rapidly converted to FVIIa by limited proteolysis once it binds to tissue to form the active tissue factor-FVIIa complex. The FVIIa, which circulates as an enzyme at a concentration of approximately 0.1 nM (1% of plasma FVII), can also bind directly to tissue factor. The allosteric interaction between tissue factor and FVIIa on the tissue factor-FVIIa complex greatly increases the enzymatic activity of FVIIa: an approximate 20- to 100-fold increase in the rate of hydrolysis of small, chromogenic peptidyl substrates, and nearly a million-fold increase in the rate of activation of the natural macromolecular substrates FIX and FX. In concert with allosteric activation of the active site of FVIIa upon binding to tissue factor, the formation of tissue factor-FVIIa complex on phospholipid bilayer (i.e., upon exposure of phosphatidyl-L-serine on membrane surfaces) increases the rate of FIX or FX activation, in a Ca²⁺-dependent manner, an additional 1,000-fold. The roughly million-fold overall increase in FX activation by tissue factor-FVIIa-phospholipid complex relative to free FVIIa is a critical regulatory point for the coagulation cascade.

[0478] FVII is a ˜50 kDa, single-chain polypeptide consisting of 406 amino acid residues, with an N-terminal γ-carboxyglutamate-rich (GLA) domain, two epidermal growth factor-like domains (EGF1 and EFG2), and a C-terminal serine protease domain. FVII is activated to FVIIa by a specific proteolytic cleavage of the Ile-¹⁵⁴-Arg¹⁵² bond in the short linker region between the EGF2 and the protease domain. This cleavage results in the light and heavy chains being held together by a single disulfide bond of Cys¹³⁵ and Cys²⁶². FVIIa binds phospholipid membrane in a Ca²⁺-dependent manner through its N-terminal GLA-domain. Immediately C-terminal to the GLA domain is an aromatic stack and two EGF domains. The aromatic stack connects the GLA to EGF1 domain which binds a single Ca²⁺ ion. Occupancy of this Ca²⁺-binding site increases FVIIa amidolytic activity and tissue factor association. The catalytic triad consist of His193, Asp²⁴², and Ser³⁴⁴, and binding of a single Ca²⁺ ion within the FVIIa protease domain is critical for its catalytic activity. Proteolytic activation of FVII to FVIIa frees the newly formed amino terminus at Ile¹⁵³ to fold back and be inserted into the activation pocket forming a salt bridge with the carboxylate of Asp³⁴³ to generate the oxyanion hole. Formation of this salt bridge is critical for FVIIa activity. However, oxyanion hole formation does not occur in free FVIIa upon proteolytic activation. As a result, FVIIa circulates in a zymogen-like state that is poorly recognized by plasma protease inhibitors, allowing it to circulate with a half-life of approximately 90 minutes.

[0479] Tissue factor-mediated positioning of the FVIIa active site above the membrane surface is important for FVIIa towards cognate substrates. Free FVIIa adopts a stable, extended structure when bound to the membrane with its active site positioned ˜80 Å above the membrane surface. Upon FVIIa binding to tissue factor, the FVa active site is repositioned ˜6 Å closer to the membrane. This modulation may aid in a proper alignment of the FVIIa catalytic triad with the target substrate cleavage site. Using GLA-domainless FVIIa, it has been shown that the active site was still positioned a similar distance above the membrane, demonstrating that tissue factor is able to fully support FVIIa active site positioning even in the absence of FVIIa-membrane interaction. Additional data showed that tissue factor supported full FVIIa proteolytic activity as long as the tissue factor extracellular domain was tethered in some way to the membrane surface. However, raising the active site of FVIIa greater than 80 Å above the membrane surface greatly reduced the ability of the tissue factor-FVIIa complex to activate FX but did not diminish tissue factor-FVIIa amidolytic activity.

[0480] Alanine scanning mutagenesis has been used to assess the role of specific amino acid side chains in the tissue factor extracellular domain for interaction with FVIIa (Gibbs et al., Biochemistry 33(47): 14003-14010, 1994; Schullek et al., J Biol Chem 269(30): 19399-19403, 1994). Alanine substitution identified a limited number of residue positions at which alanine replacements cause 5- to 10-fold lower affinity for FVIIa binding. Most of these residue side chains were found to be well-exposed to solvent in the crystal structure, concordant with macromolecular ligand interaction. The FVIIa ligand-binding site is located over an extensive region at the boundary between the two modules. In the C-module, residues Arg¹³⁵ and Phe¹⁴⁰ located on the protruding B-C loop provide an independent contact with FVIIa. Leu¹³³ is located at the base of the fingerlike structure and packed into the cleft between the two modules. This provides continuity to a major cluster of important binding residues consisting of Lys²⁰, Thr⁶⁰, Asp⁵⁸, and Ile²². Thr⁶⁰ is only partially solvent-exposed and may play a local structural role rather than making a significant contact with ligand. The binding site extends onto the concave side of the intermodule angle involving Glu²⁴ and Gln¹¹⁰, and potentially the more distant residue Val²⁰⁷. The binding region extends from Asp⁵⁸ onto a convex surface area formed by Lys⁴⁸, Lys⁴⁶, Gln³⁷, Asp⁴⁴, and Trp⁴⁵. Trp⁴⁵ and Asp⁴⁴ do not interact independently with FVIIa, indicating that the mutational effect at the Trp⁴⁵ position may reflect a structural importance of this side chain for the local packing of the adjacent Asp⁴⁴ and Gln³⁷ side chain. The interactive area further includes two surface-exposed aromatic residues, Phe⁷⁶ and Tyr⁷⁸, which form part of the hydrophobic cluster in the N-module.

[0481] The known physiologic substrates of tissue factor-FVIIa are FVII, FIX, and FX and certain proteinase-activated receptors. Mutational analysis has identified a number of residues that, when mutated, support full FVIIa amidolytic activity towards small peptidyl substrates but are deficient in their ability to support macromolecular substrate (i.e., FVII, FIX, and FX) activation (Ruf et al., J Biol Chem 267(31): 22206-22210, 1992; Ruf et al., J Biol Chem 267(9): 6375-6381, 1992; Huang et al., J Biol Chem 271(36): 21752-21757, 1996; Kirchhofer et al., Biochemistry 39(25): 7380-7387, 2000). The tissue factor loop region at residues 159-165, and residues in or adjacent to this flexible loop have been shown to be critical for the proteolytic activity of the tissue factor-FVIIa complex. This defines the proposed substrate-binding exosite region of tissue factor that is quite distant from the FVIIa active site. A substitution of the glycine residue by a marginally bulkier residue alanine, significantly impairs tissue factor-FVIIa proteolytic activity. This suggests that the flexibility afforded by glycine is critical for the loop of residues 159-165 for tissue factor macromolecular substrate recognition.

[0482] The residues Lys¹⁶⁵ and Lys¹⁶⁶ have also been demonstrated to be important for substrate recognition and binding. Mutation of either of these residues to alanine results in a significant decrease in the tissue factor co-factor function. Lys¹⁶⁵ and Lys¹⁶⁶ face away from each other, with Lys¹⁶⁵ pointing towards FVIIa in most tissue factor-FVIIa structures, and Lys¹⁶⁶ pointing into the substrate binding exosite region in the crystal structure. Putative salt bridge formation between Lys¹⁶⁵ of and Gla³⁵ of FVIIa would support the notion that tissue factor interaction with the GLA domain of FVIIa modulates substrate recognition. These results suggest that the C-terminal portion of the tissue factor ectodomain directly interacts with the GLA-domain, the possible adjacent EGF1 domains, of FIX and FX, and that the presence of the FVIIa GLA-domain may modulate these interactions either directly or indirectly.

### Soluble Tissue Factor Domain

[0483] In some embodiments of any of the polypeptides, compositions, or methods described herein, the soluble tissue factor domain can be a wildtype tissue factor polypeptide lacking the signal sequence, the transmembrane domain, and the intracellular domain. In some examples, the soluble tissue factor domain can be a tissue factor mutant, wherein a wildtype tissue factor polypeptide lacking the signal sequence, the transmembrane domain, and the intracellular domain, and has been further modified at selected amino acids. In some examples, the soluble tissue factor domain can be a soluble human tissue factor domain. In some examples, the soluble tissue factor domain can be a soluble mouse tissue factor domain. In some examples, the soluble tissue factor domain can be a soluble rat tissue factor domain. Non-limiting examples of soluble human tissue factor domains, a mouse soluble tissue factor domain, a rat soluble tissue factor domain, and mutant soluble tissue factor domains are shown below.

Exemplary Soluble Human Tissue Factor Domain
(SEQ ID NO: 93)
SGTTNTVAAYNLTWKSTNFKTILEWEPKPVNQVYTVQISTKSGDWKSKCF
YTTDTECDLTDEIVKDVKQTYLARVFSYPAGNVESTGSAGEPLYENSPEF
TPYLETNLGQPTIQSFEQVGTKVNVTVEDERTLVRRNNTFLSLRDVFGKD
LIYTLYYWKSSSSGKKTAKTNTNEFLIDVDKGENYCFSVQAVIPSRTVNR
KSTDSPVECMGQEKGEFRE
Exemplary Nucleic Acid Encoding Soluble Human
Tissue Factor Domain
(SEQ ID NO: 94)
AGCGGCACAACCAACACAGTCGCTGCCTATAACCTCACTTGGAAGAGCAC
CAACTTCAAAACCATCCTCGAATGGGAACCCAAACCCGTTAACCAAGTTT
ACACCGTGCAGATCAGCACCAAGTCCGGCGACTGGAAGTCCAAATGTTTC
TATACCACCGACACCGAGTGCGATCTCACCGATGAGATCGTGAAAGATGT
GAAACAGACCTACCTCGCCCGGGTGTTTAGCTACCCCGCCGGCAATGTGG
AGAGCACTGGTTCCGCTGGCGAGCCTTTATACGAGAACAGCCCCGAATTT
ACCCCTTACCTCGAGACCAATTTAGGACAGCCCACCATCCAAAGCTTTGA
GCAAGTTGGCACAAAGGTGAATGTGACAGTGGAGGACGAGCGGACTTTAG
TGCGGCGGAACAACACCTTTCTCAGCCTCCGGGATGTGTTCGGCAAAGAT
TTAATCTACACACTGTATTACTGGAAGTCCTCTTCCTCCGGCAAGAAGAC
AGCTAAAACCAACACAAACGAGTTTTTAATCGACGTGGATAAAGGCGAAA
ACTACTGTTTCAGCGTGCAAGCTGTGATCCCCTCCCGGACCGTGAATAGG
AAAAGCACCGATAGCCCCGTTGAGTGCATGGGCCAAGAAAAGGGCGAGTT
CCGGGAG
Exemplary Soluble Mouse Tissue Factor Domain
(SEQ ID NO: 95)
agipekafnltwistdfktilewqpkptnytytvqisdrsrnwknkcfst
tdtecdltdeivkdvtwayeakvlsvprrnsvhgdgdqlvihgeeppftn
apkflpyrdtnlggpviqqfeqdgrklnvvvkdsltlvrkngtfltlrqv
fgkdlgyiityrkgsstgkktnitntnefsidveegvsycffvqamifsr
ktnqnspgsstvcteqwksflge
Exemplary Soluble Rat Tissue Factor Domain
(SEQ ID NO: 96)
Agtppgkafnltwistdfktilewqpkptnytytvqisdrsrnwkykctg
ttdtecdltdeivkdvnwtyearvlsvpwrnsthgketlfgthgeeppft
narkflpyrdtkigqpviqkyeqggtklkvtvkdsftlvrkngtfltlrq
vfgndlgyiltyrkdsstgrktntthtneflidvekgvsycffaqavifs
rktnhkspesitkcteqwksvlge
Exemplary Mutant Soluble Human Tissue Factor
Domain
(SEQ ID NO: 97)
SGTTNTVAAYNLTWKSTNFATALEWEPKPVNQVYTVQISTKSGDWKSKCF
YTTDTECALTDEIVKDVKQTYLARVFSYPAGNVESTGSAGEPLYENSPEF
TPYLETNLGQPTIQSFEQVGTKVNVTVEDERTLVARNNTALSLRDVFGKD
LIYTLYYWKSSSSGKKTAKTNTNEFLIDVDKGENYCFSVQAVIPSRTVNR
KSTDSPVECMGQEKGEFRE
Exemplary Mutant Soluble Human Tissue Factor
Domain
(SEQ ID NO: 98)
SGTTNTVAAYNLTWKSTNFATALEWEPKPVNQVYTVQISTKSGDAKSKCF
YTTDTECALTDEIVKDVKQTYLARVFSYPAGNVESTGSAGEPLAENSPEF
TPYLETNLGQPTIQSFEQVGTKVNVTVEDERTLVARNNTALSLRDVFGKD
LIYTLYYWKSSSSGKKTAKTNTNEFLIDVDKGENYCFSVQAVIPSRTVNR
KSTDSPVECMGQEKGEFRE

[0484] In some embodiments, a soluble tissue factor domain can include a sequence that is at least 70% identical, at least 72% identical, at least 74% identical, at least 76% identical, at least 78% identical, at least 80% identical, at least 82% identical, at least 84% identical, at least 86% identical, at least 88% identical, at least 90% identical, at least 92% identical, at least 94% identical, at least 96% identical, at least 98% identical, at least 99% identical, or 100% identical to SEQ ID NO: 93, 95, 96, 97 or 98. In some embodiments, a soluble tissue factor domain can include a sequence of SEQ ID NO: 93, 95, 96, 97, or 98, with one to twenty amino acids (e.g., 2, 3, 4, 5, 6, 7, 8, 9, 10, 11, 12, 13, 14, 15, 16, 17, 18, 19, or 20) amino acids removed from its N-terminus and/or one to twenty amino acids (e.g., 2, 3, 4, 5, 6, 7, 8, 9, 10, 11, 12, 13, 14, 15, 16, 17, 18, 19, or 20) amino acids removed from its C-terminus.

[0485] As can be appreciated in the art, one skilled in the art would understand that mutation of amino acids that are conserved between different mammalian species is more likely to decrease the activity and/or structural stability of the protein, while mutation of amino acids that are not conserved between different mammalian species is less likely to decrease the activity and/or structural stability of the protein.

[0486] In some examples of any of the multi-chain chimeric polypeptides described herein, the soluble tissue factor domain is not capable of binding to Factor VIIa. In some examples of any of the multi-chain chimeric polypeptides described herein, the soluble tissue factor domain does not convert inactive Factor X into Factor Xa. In some embodiments of any of the multi-chain chimeric polypeptides described herein, the multi-chain chimeric polypeptide does not stimulate blood coagulation in a mammal.

[0487] In some examples, the soluble tissue factor domain can be a soluble human tissue factor domain. In some embodiments, the soluble tissue factor domain can be a soluble mouse tissue factor domain. In some embodiments, the soluble tissue factor domain can be a soluble rat tissue factor domain.

[0488] In some examples, the soluble tissue factor domain does not include one or more (e.g., two, three, four, five, six, or seven) of: a lysine at an amino acid position that corresponds to amino acid position 20 of mature wildtype human tissue factor protein; an isoleucine at an amino acid position that corresponds to amino acid position 22 of mature wildtype human tissue factor protein; a tryptophan at an amino acid position that corresponds to amino acid position 45 of mature wildtype human tissue factor protein; an aspartic acid at an amino acid position that corresponds to amino acid position 58 of mature wildtype human tissue factor protein; a tyrosine at an amino acid position that corresponds to amino acid position 94 of mature wildtype human tissue factor protein; an arginine at an amino acid position that corresponds to amino acid position 135 of mature wildtype human tissue factor protein; and a phenylalanine at an amino acid position that corresponds to amino acid position 140 of mature wildtype human tissue factor protein. In some embodiments, the mutant soluble tissue factor possesses the amino acid sequence of SEQ ID NO: 97 or SEQ ID NO: 98.

[0489] In some examples, the soluble tissue factor domain can be encoded by a nucleic acid including a sequence that is at least 70% identical, at least 72% identical, at least 74% identical, at least 76% identical, at least 78% identical, at least 80% identical, at least 82% identical, at least 84% identical, at least 86% identical, at least 88% identical, at least 90% identical, at least 92% identical, at least 94% identical, at least 96% identical, at least 98% identical, at least 99% identical, or 100% identical to SEQ ID NO: 94.

[0490] In some embodiments, the soluble tissue factor domain can have a total length of about 20 amino acids to about 220 amino acids, about 20 amino acids to about 215 amino acids, about 20 amino acids to about 210 amino acids, about 20 amino acids to about 205 amino acids, about 20 amino acids to about 200 amino acids, about 20 amino acids to about 195 amino acids, about 20 amino acids to about 190 amino acids, about 20 amino acids to about 185 amino acids, about 20 amino acids to about 180 amino acids, about 20 amino acids to about 175 amino acids, about 20 amino acids to about 170 amino acids, about 20 amino acids to about 165 amino acids, about 20 amino acids to about 160 amino acids, about 20 amino acids to about 155 amino acids, about 20 amino acids to about 150 amino acids, about 20 amino acids to about 145 amino acids, about 20 amino acids to about 140 amino acids, about 20 amino acids to about 135 amino acids, about 20 amino acids to about 130 amino acids, about 20 amino acids to about 125 amino acids, about 20 amino acids to about 120 amino acids, about 20 amino acids to about 115 amino acids, about 20 amino acids to about 110 amino acids, about 20 amino acids to about 105 amino acids, about 20 amino acids to about 100 amino acids, about 20 amino acids to about 95 amino acids, about 20 amino acids to about 90 amino acids, about 20 amino acids to about 85 amino acids, about 20 amino acids to about 80 amino acids, about 20 amino acids to about 75 amino acids, about 20 amino acids to about 70 amino acids, about 20 amino acids to about 60 amino acids, about 20 amino acids to about 50 amino acids, about 20 amino acids to about 40 amino acids, about 20 amino acids to about 30 amino acids, about 30 amino acids to about 220 amino acids, about 30 amino acids to about 215 amino acids, about 30 amino acids to about 210 amino acids, about 30 amino acids to about 205 amino acids, about 30 amino acids to about 200 amino acids, about 30 amino acids to about 195 amino acids, about 30 amino acids to about 190 amino acids, about 30 amino acids to about 185 amino acids, about 30 amino acids to about 180 amino acids, about 30 amino acids to about 175 amino acids, about 30 amino acids to about 170 amino acids, about 30 amino acids to about 165 amino acids, about 30 amino acids to about 160 amino acids, about 30 amino acids to about 155 amino acids, about 30 amino acids to about 150 amino acids, about 30 amino acids to about 145 amino acids, about 30 amino acids to about 140 amino acids, about 30 amino acids to about 135 amino acids, about 30 amino acids to about 130 amino acids, about 30 amino acids to about 125 amino acids, about 30 amino acids to about 120 amino acids, about 30 amino acids to about 115 amino acids, about 30 amino acids to about 110 amino acids, about 30 amino acids to about 105 amino acids, about 30 amino acids to about 100 amino acids, about 30 amino acids to about 95 amino acids, about 30 amino acids to about 90 amino acids, about 30 amino acids to about 85 amino acids, about 30 amino acids to about 80 amino acids, about 30 amino acids to about 75 amino acids, about 30 amino acids to about 70 amino acids, about 30 amino acids to about 60 amino acids, about 30 amino acids to about 50 amino acids, about 30 amino acids to about 40 amino acids, about 40 amino acids to about 220 amino acids, about 40 amino acids to about 215 amino acids, about 40 amino acids to about 210 amino acids, about 40 amino acids to about 205 amino acids, about 40 amino acids to about 200 amino acids, about 40 amino acids to about 195 amino acids, about 40 amino acids to about 190 amino acids, about 40 amino acids to about 185 amino acids, about 40 amino acids to about 180 amino acids, about 40 amino acids to about 175 amino acids, about 40 amino acids to about 170 amino acids, about 40 amino acids to about 165 amino acids, about 40 amino acids to about 160 amino acids, about 40 amino acids to about 155 amino acids, about 40 amino acids to about 150 amino acids, about 40 amino acids to about 145 amino acids, about 40 amino acids to about 140 amino acids, about 40 amino acids to about 135 amino acids, about 40 amino acids to about 130 amino acids, about 40 amino acids to about 125 amino acids, about 40 amino acids to about 120 amino acids, about 40 amino acids to about 115 amino acids, about 40 amino acids to about 110 amino acids, about 40 amino acids to about 105 amino acids, about 40 amino acids to about 100 amino acids, about 40 amino acids to about 95 amino acids, about 40 amino acids to about 90 amino acids, about 40 amino acids to about 85 amino acids, about 40 amino acids to about 80 amino acids, about 40 amino acids to about 75 amino acids, about 40 amino acids to about 70 amino acids, about 40 amino acids to about 60 amino acids, about 40 amino acids to about 50 amino acids, about 50 amino acids to about 220 amino acids, about 50 amino acids to about 215 amino acids, about 50 amino acids to about 210 amino acids, about 50 amino acids to about 205 amino acids, about 50 amino acids to about 200 amino acids, about 50 amino acids to about 195 amino acids, about 50 amino acids to about 190 amino acids, about 50 amino acids to about 185 amino acids, about 50 amino acids to about 180 amino acids, about 50 amino acids to about 175 amino acids, about 50 amino acids to about 170 amino acids, about 50 amino acids to about 165 amino acids, about 50 amino acids to about 160 amino acids, about 50 amino acids to about 155 amino acids, about 50 amino acids to about 150 amino acids, about 50 amino acids to about 145 amino acids, about 50 amino acids to about 140 amino acids, about 50 amino acids to about 135 amino acids, about 50 amino acids to about 130 amino acids, about 50 amino acids to about 125 amino acids, about 50 amino acids to about 120 amino acids, about 50 amino acids to about 115 amino acids, about 50 amino acids to about 110 amino acids, about 50 amino acids to about 105 amino acids, about 50 amino acids to about 100 amino acids, about 50 amino acids to about 95 amino acids, about 50 amino acids to about 90 amino acids, about 50 amino acids to about 85 amino acids, about 50 amino acids to about 80 amino acids, about 50 amino acids to about 75 amino acids, about 50 amino acids to about 70 amino acids, about 50 amino acids to about 60 amino acids, about 60 amino acids to about 220 amino acids, about 60 amino acids to about 215 amino acids, about 60 amino acids to about 210 amino acids, about 60 amino acids to about 205 amino acids, about 60 amino acids to about 200 amino acids, about 60 amino acids to about 195 amino acids, about 60 amino acids to about 190 amino acids, about 60 amino acids to about 185 amino acids, about 60 amino acids to about 180 amino acids, about 60 amino acids to about 175 amino acids, about 60 amino acids to about 170 amino acids, about 60 amino acids to about 165 amino acids, about 60 amino acids to about 160 amino acids, about 60 amino acids to about 155 amino acids, about 60 amino acids to about 150 amino acids, about 60 amino acids to about 145 amino acids, about 60 amino acids to about 140 amino acids, about 60 amino acids to about 135 amino acids, about 60 amino acids to about 130 amino acids, about 60 amino acids to about 125 amino acids, about 60 amino acids to about 120 amino acids, about 60 amino acids to about 115 amino acids, about 60 amino acids to about 110 amino acids, about 60 amino acids to about 105 amino acids, about 60 amino acids to about 100 amino acids, about 60 amino acids to about 95 amino acids, about 60 amino acids to about 90 amino acids, about 60 amino acids to about 85 amino acids, about 60 amino acids to about 80 amino acids, about 60 amino acids to about 75 amino acids, about 60 amino acids to about 70 amino acids, about 70 amino acids to about 220 amino acids, about 70 amino acids to about 215 amino acids, about 70 amino acids to about 210 amino acids, about 70 amino acids to about 205 amino acids, about 70 amino acids to about 200 amino acids, about 70 amino acids to about 195 amino acids, about 70 amino acids to about 190 amino acids, about 70 amino acids to about 185 amino acids, about 70 amino acids to about 180 amino acids, about 70 amino acids to about 175 amino acids, about 70 amino acids to about 170 amino acids, about 70 amino acids to about 165 amino acids, about 70 amino acids to about 160 amino acids, about 70 amino acids to about 155 amino acids, about 70 amino acids to about 150 amino acids, about 70 amino acids to about 145 amino acids, about 70 amino acids to about 140 amino acids, about 70 amino acids to about 135 amino acids, about 70 amino acids to about 130 amino acids, about 70 amino acids to about 125 amino acids, about 70 amino acids to about 120 amino acids, about 70 amino acids to about 115 amino acids, about 70 amino acids to about 110 amino acids, about 70 amino acids to about 105 amino acids, about 70 amino acids to about 100 amino acids, about 70 amino acids to about 95 amino acids, about 70 amino acids to about 90 amino acids, about 70 amino acids to about 85 amino acids, about 70 amino acids to about 80 amino acids, about 80 amino acids to about 220 amino acids, about 80 amino acids to about 215 amino acids, about 80 amino acids to about 210 amino acids, about 80 amino acids to about 205 amino acids, about 80 amino acids to about 200 amino acids, about 80 amino acids to about 195 amino acids, about 80 amino acids to about 190 amino acids, about 80 amino acids to about 185 amino acids, about 80 amino acids to about 180 amino acids, about 80 amino acids to about 175 amino acids, about 80 amino acids to about 170 amino acids, about 80 amino acids to about 165 amino acids, about 80 amino acids to about 160 amino acids, about 80 amino acids to about 155 amino acids, about 80 amino acids to about 150 amino acids, about 80 amino acids to about 145 amino acids, about 80 amino acids to about 140 amino acids, about 80 amino acids to about 135 amino acids, about 80 amino acids to about 130 amino acids, about 80 amino acids to about 125 amino acids, about 80 amino acids to about 120 amino acids, about 80 amino acids to about 115 amino acids, about 80 amino acids to about 110 amino acids, about 80 amino acids to about 105 amino acids, about 80 amino acids to about 100 amino acids, about 80 amino acids to about 95 amino acids, about 80 amino acids to about 90 amino acids, about 90 amino acids to about 220 amino acids, about 90 amino acids to about 215 amino acids, about 90 amino acids to about 210 amino acids, about 90 amino acids to about 205 amino acids, about 90 amino acids to about 200 amino acids, about 90 amino acids to about 195 amino acids, about 90 amino acids to about 190 amino acids, about 90 amino acids to about 185 amino acids, about 90 amino acids to about 180 amino acids, about 90 amino acids to about 175 amino acids, about 90 amino acids to about 170 amino acids, about 90 amino acids to about 165 amino acids, about 90 amino acids to about 160 amino acids, about 90 amino acids to about 155 amino acids, about 90 amino acids to about 150 amino acids, about 90 amino acids to about 145 amino acids, about 90 amino acids to about 140 amino acids, about 90 amino acids to about 135 amino acids, about 90 amino acids to about 130 amino acids, about 90 amino acids to about 125 amino acids, about 90 amino acids to about 120 amino acids, about 90 amino acids to about 115 amino acids, about 90 amino acids to about 110 amino acids, about 90 amino acids to about 105 amino acids, about 90 amino acids to about 100 amino acids, about 100 amino acids to about 220 amino acids, about 100 amino acids to about 215 amino acids, about 100 amino acids to about 210 amino acids, about 100 amino acids to about 205 amino acids, about 100 amino acids to about 200 amino acids, about 100 amino acids to about 195 amino acids, about 100 amino acids to about 190 amino acids, about 100 amino acids to about 185 amino acids, about 100 amino acids to about 180 amino acids, about 100 amino acids to about 175 amino acids, about 100 amino acids to about 170 amino acids, about 100 amino acids to about 165 amino acids, about 100 amino acids to about 160 amino acids, about 100 amino acids to about 155 amino acids, about 100 amino acids to about 150 amino acids, about 100 amino acids to about 145 amino acids, about 100 amino acids to about 140 amino acids, about 100 amino acids to about 135 amino acids, about 100 amino acids to about 130 amino acids, about 100 amino acids to about 125 amino acids, about 100 amino acids to about 120 amino acids, about 100 amino acids to about 115 amino acids, about 100 amino acids to about 110 amino acids, about 110 amino acids to about 220 amino acids, about 110 amino acids to about 215 amino acids, about 110 amino acids to about 210 amino acids, about 110 amino acids to about 205 amino acids, about 110 amino acids to about 200 amino acids, about 110 amino acids to about 195 amino acids, about 110 amino acids to about 190 amino acids, about 110 amino acids to about 185 amino acids, about 110 amino acids to about 180 amino acids, about 110 amino acids to about 175 amino acids, about 110 amino acids to about 170 amino acids, about 110 amino acids to about 165 amino acids, about 110 amino acids to about 160 amino acids, about 110 amino acids to about 155 amino acids, about 110 amino acids to about 150 amino acids, about 110 amino acids to about 145 amino acids, about 110 amino acids to about 140 amino acids, about 110 amino acids to about 135 amino acids, about 110 amino acids to about 130 amino acids, about 110 amino acids to about 125 amino acids, about 110 amino acids to about 120 amino acids, about 110 amino acids to about 115 amino acids, about 115 amino acids to about 220 amino acids, about 115 amino acids to about 215 amino acids, about 115 amino acids to about 210 amino acids, about 115 amino acids to about 205 amino acids, about 115 amino acids to about 200 amino acids, about 115 amino acids to about 195 amino acids, about 115 amino acids to about 190 amino acids, about 115 amino acids to about 185 amino acids, about 115 amino acids to about 180 amino acids, about 115 amino acids to about 175 amino acids, about 115 amino acids to about 170 amino acids, about 115 amino acids to about 165 amino acids, about 115 amino acids to about 160 amino acids, about 115 amino acids to about 155 amino acids, about 115 amino acids to about 150 amino acids, about 115 amino acids to about 145 amino acids, about 115 amino acids to about 140 amino acids, about 115 amino acids to about 135 amino acids, about 115 amino acids to about 130 amino acids, about 115 amino acids to about 125 amino acids, about 115 amino acids to about 120 amino acids, about 120 amino acids to about 220 amino acids, about 120 amino acids to about 215 amino acids, about 120 amino acids to about 210 amino acids, about 120 amino acids to about 205 amino acids, about 120 amino acids to about 200 amino acids, about 120 amino acids to about 195 amino acids, about 120 amino acids to about 190 amino acids, about 120 amino acids to about 185 amino acids, about 120 amino acids to about 180 amino acids, about 120 amino acids to about 175 amino acids, about 120 amino acids to about 170 amino acids, about 120 amino acids to about 165 amino acids, about 120 amino acids to about 160 amino acids, about 120 amino acids to about 155 amino acids, about 120 amino acids to about 150 amino acids, about 120 amino acids to about 145 amino acids, about 120 amino acids to about 140 amino acids, about 120 amino acids to about 135 amino acids, about 120 amino acids to about 130 amino acids, about 120 amino acids to about 125 amino acids, about 125 amino acids to about 220 amino acids, about 125 amino acids to about 215 amino acids, about 125 amino acids to about 210 amino acids, about 125 amino acids to about 205 amino acids, about 125 amino acids to about 200 amino acids, about 125 amino acids to about 195 amino acids, about 125 amino acids to about 190 amino acids, about 125 amino acids to about 185 amino acids, about 125 amino acids to about 180 amino acids, about 125 amino acids to about 175 amino acids, about 125 amino acids to about 170 amino acids, about 125 amino acids to about 165 amino acids, about 125 amino acids to about 160 amino acids, about 125 amino acids to about 155 amino acids, about 125 amino acids to about 150 amino acids, about 125 amino acids to about 145 amino acids, about 125 amino acids to about 140 amino acids, about 125 amino acids to about 135 amino acids, about 125 amino acids to about 130 amino acids, about 130 amino acids to about 220 amino acids, about 130 amino acids to about 215 amino acids, about 130 amino acids to about 210 amino acids, about 130 amino acids to about 205 amino acids, about 130 amino acids to about 200 amino acids, about 130 amino acids to about 195 amino acids, about 130 amino acids to about 190 amino acids, about 130 amino acids to about 185 amino acids, about 130 amino acids to about 180 amino acids, about 130 amino acids to about 175 amino acids, about 130 amino acids to about 170 amino acids, about 130 amino acids to about 165 amino acids, about 130 amino acids to about 160 amino acids, about 130 amino acids to about 155 amino acids, about 130 amino acids to about 150 amino acids, about 130 amino acids to about 145 amino acids, about 130 amino acids to about 140 amino acids, about 130 amino acids to about 135 amino acids, about 135 amino acids to about 220 amino acids, about 135 amino acids to about 215 amino acids, about 135 amino acids to about 210 amino acids, about 135 amino acids to about 205 amino acids, about 135 amino acids to about 200 amino acids, about 135 amino acids to about 195 amino acids, about 135 amino acids to about 190 amino acids, about 135 amino acids to about 185 amino acids, about 135 amino acids to about 180 amino acids, about 135 amino acids to about 175 amino acids, about 135 amino acids to about 170 amino acids, about 135 amino acids to about 165 amino acids, about 135 amino acids to about 160 amino acids, about 135 amino acids to about 155 amino acids, about 135 amino acids to about 150 amino acids, about 135 amino acids to about 145 amino acids, about 135 amino acids to about 140 amino acids, about 140 amino acids to about 220 amino acids, about 140 amino acids to about 215 amino acids, about 140 amino acids to about 210 amino acids, about 140 amino acids to about 205 amino acids, about 140 amino acids to about 200 amino acids, about 140 amino acids to about 195 amino acids, about 140 amino acids to about 190 amino acids, about 140 amino acids to about 185 amino acids, about 140 amino acids to about 180 amino acids, about 140 amino acids to about 175 amino acids, about 140 amino acids to about 170 amino acids, about 140 amino acids to about 165 amino acids, about 140 amino acids to about 160 amino acids, about 140 amino acids to about 155 amino acids, about 140 amino acids to about 150 amino acids, about 140 amino acids to about 145 amino acids, about 145 amino acids to about 220 amino acids, about 145 amino acids to about 215 amino acids, about 145 amino acids to about 210 amino acids, about 145 amino acids to about 205 amino acids, about 145 amino acids to about 200 amino acids, about 145 amino acids to about 195 amino acids, about 145 amino acids to about 190 amino acids, about 145 amino acids to about 185 amino acids, about 145 amino acids to about 180 amino acids, about 145 amino acids to about 175 amino acids, about 145 amino acids to about 170 amino acids, about 145 amino acids to about 165 amino acids, about 145 amino acids to about 160 amino acids, about 145 amino acids to about 155 amino acids, about 145 amino acids to about 150 amino acids, about 150 amino acids to about 220 amino acids, about 150 amino acids to about 215 amino acids, about 150 amino acids to about 210 amino acids, about 150 amino acids to about 205 amino acids, about 150 amino acids to about 200 amino acids, about 150 amino acids to about 195 amino acids, about 150 amino acids to about 190 amino acids, about 150 amino acids to about 185 amino acids, about 150 amino acids to about 180 amino acids, about 150 amino acids to about 175 amino acids, about 150 amino acids to about 170 amino acids, about 150 amino acids to about 165 amino acids, about 150 amino acids to about 160 amino acids, about 150 amino acids to about 155 amino acids, about 155 amino acids to about 220 amino acids, about 155 amino acids to about 215 amino acids, about 155 amino acids to about 210 amino acids, about 155 amino acids to about 205 amino acids, about 155 amino acids to about 200 amino acids, about 155 amino acids to about 195 amino acids, about 155 amino acids to about 190 amino acids, about 155 amino acids to about 185 amino acids, about 155 amino acids to about 180 amino acids, about 155 amino acids to about 175 amino acids, about 155 amino acids to about 170 amino acids, about 155 amino acids to about 165 amino acids, about 155 amino acids to about 160 amino acids, about 160 amino acids to about 220 amino acids, about 160 amino acids to about 215 amino acids, about 160 amino acids to about 210 amino acids, about 160 amino acids to about 205 amino acids, about 160 amino acids to about 200 amino acids, about 160 amino acids to about 195 amino acids, about 160 amino acids to about 190 amino acids, about 160 amino acids to about 185 amino acids, about 160 amino acids to about 180 amino acids, about 160 amino acids to about 175 amino acids, about 160 amino acids to about 170 amino acids, about 160 amino acids to about 165 amino acids, about 165 amino acids to about 220 amino acids, about 165 amino acids to about 215 amino acids, about 165 amino acids to about 210 amino acids, about 165 amino acids to about 205 amino acids, about 165 amino acids to about 200 amino acids, about 165 amino acids to about 195 amino acids, about 165 amino acids to about 190 amino acids, about 165 amino acids to about 185 amino acids, about 165 amino acids to about 180 amino acids, about 165 amino acids to about 175 amino acids, about 165 amino acids to about 170 amino acids, about 170 amino acids to about 220 amino acids, about 170 amino acids to about 215 amino acids, about 170 amino acids to about 210 amino acids, about 170 amino acids to about 205 amino acids, about 170 amino acids to about 200 amino acids, about 170 amino acids to about 195 amino acids, about 170 amino acids to about 190 amino acids, about 170 amino acids to about 185 amino acids, about 170 amino acids to about 180 amino acids, about 170 amino acids to about 175 amino acids, about 175 amino acids to about 220 amino acids, about 175 amino acids to about 215 amino acids, about 175 amino acids to about 210 amino acids, about 175 amino acids to about 205 amino acids, about 175 amino acids to about 200 amino acids, about 175 amino acids to about 195 amino acids, about 175 amino acids to about 190 amino acids, about 175 amino acids to about 185 amino acids, about 175 amino acids to about 180 amino acids, about 180 amino acids to about 220 amino acids, about 180 amino acids to about 215 amino acids, about 180 amino acids to about 210 amino acids, about 180 amino acids to about 205 amino acids, about 180 amino acids to about 200 amino acids, about 180 amino acids to about 195 amino acids, about 180 amino acids to about 190 amino acids, about 180 amino acids to about 185 amino acids, about 185 amino acids to about 220 amino acids, about 185 amino acids to about 215 amino acids, about 185 amino acids to about 210 amino acids, about 185 amino acids to about 205 amino acids, about 185 amino acids to about 200 amino acids, about 185 amino acids to about 195 amino acids, about 185 amino acids to about 190 amino acids, about 190 amino acids to about 220 amino acids, about 190 amino acids to about 215 amino acids, about 190 amino acids to about 210 amino acids, about 190 amino acids to about 205 amino acids, about 190 amino acids to about 200 amino acids, about 190 amino acids to about 195 amino acids, about 195 amino acids to about 220 amino acids, about 195 amino acids to about 215 amino acids, about 195 amino acids to about 210 amino acids, about 195 amino acids to about 205 amino acids, about 195 amino acids to about 200 amino acids, about 200 amino acids to about 220 amino acids, about 200 amino acids to about 215 amino acids, about 200 amino acids to about 210 amino acids, about 200 amino acids to about 205 amino acids, about 205 amino acids to about 220 amino acids, about 205 amino acids to about 215 amino acids, about 205 amino acids to about 210 amino acids, about 210 amino acids to about 220 amino acids, about 210 amino acids to about 215 amino acids, or about 215 amino acids to about 220 amino acids.

### Linker Sequences

[0491] In some embodiments, the linker sequence can be a flexible linker sequence. Non-limiting examples of linker sequences that can be used are described in Klein et al., Protein Engineering, Design & Selection 27(10):325-330, 2014; Priyanka et al., Protein Sci. 22(2):153-167, 2013. In some examples, the linker sequence is a synthetic linker sequence.

[0492] In some embodiments of any of the single-chain chimeric polypeptides described herein can include one, two, three, four, five, six, seven, eight, nine, or ten linker sequence(s) (e.g., the same or different linker sequences, e.g., any of the exemplary linker sequences described herein or known in the art). In some embodiments of any of the single-chain chimeric polypeptides described herein can include one, two, three, four, five, six, seven, eight, nine, or ten linker sequence(s) (e.g., the same or different linker sequences, e.g., any of the exemplary linker sequences described herein or known in the art).

[0493] In some embodiments of any of the multi-chain chimeric polypeptides described herein, the first chimeric polypeptide can include one, two, three, four, five, six, seven, eight, nine, or ten linker sequence(s) (e.g., the same or different linker sequences, e.g., any of the exemplary linker sequences described herein or known in the art). In some embodiments of any of the multi-chain chimeric polypeptides described herein, the second chimeric polypeptide can include one, two, three, four, five, six, seven, eight, nine, or ten linker sequence(s) (e.g., the same or different linker sequences, e.g., any of the exemplary linker sequences described herein or known in the art).

[0494] In some embodiments, a linker sequence can have a total length of 1 amino acid to about 100 amino acids, 1 amino acid to about 90 amino acids, 1 amino acid to about 80 amino acids, 1 amino acid to about 70 amino acids, 1 amino acid to about 60 amino acids, 1 amino acid to about 50 amino acids, 1 amino acid to about 45 amino acids, 1 amino acid to about 40 amino acids, 1 amino acid to about 35 amino acids, 1 amino acid to about 30 amino acids, 1 amino acid to about 25 amino acids, 1 amino acid to about 24 amino acids, 1 amino acid to about 22 amino acids, 1 amino acid to about 20 amino acids, 1 amino acid to about 18 amino acids, 1 amino acid to about 16 amino acids, 1 amino acid to about 14 amino acids, 1 amino acid to about 12 amino acids, 1 amino acid to about 10 amino acids, 1 amino acid to about 8 amino acids, 1 amino acid to about 6 amino acids, 1 amino acid to about 4 amino acids, about 2 amino acids to about 100 amino acids, about 2 amino acids to about 90 amino acids, about 2 amino acids to about 80 amino acids, about 2 amino acids to about 70 amino acids, about 2 amino acids to about 60 amino acids, about 2 amino acids to about 50 amino acids, about 2 amino acids to about 45 amino acids, about 2 amino acids to about 40 amino acids, about 2 amino acids to about 35 amino acids, about 2 amino acids to about 30 amino acids, about 2 amino acids to about 25 amino acids, about 2 amino acids to about 24 amino acids, about 2 amino acids to about 22 amino acids, about 2 amino acids to about 20 amino acids, about 2 amino acids to about 18 amino acids, about 2 amino acids to about 16 amino acids, about 2 amino acids to about 14 amino acids, about 2 amino acids to about 12 amino acids, about 2 amino acids to about 10 amino acids, about 2 amino acids to about 8 amino acids, about 2 amino acids to about 6 amino acids, about 2 amino acids to about 4 amino acids, about 4 amino acids to about 100 amino acids, about 4 amino acids to about 90 amino acids, about 4 amino acids to about 80 amino acids, about 4 amino acids to about 70 amino acids, about 4 amino acids to about 60 amino acids, about 4 amino acids to about 50 amino acids, about 4 amino acids to about 45 amino acids, about 4 amino acids to about 40 amino acids, about 4 amino acids to about 35 amino acids, about 4 amino acids to about 30 amino acids, about 4 amino acids to about 25 amino acids, about 4 amino acids to about 24 amino acids, about 4 amino acids to about 22 amino acids, about 4 amino acids to about 20 amino acids, about 4 amino acids to about 18 amino acids, about 4 amino acids to about 16 amino acids, about 4 amino acids to about 14 amino acids, about 4 amino acids to about 12 amino acids, about 4 amino acids to about 10 amino acids, about 4 amino acids to about 8 amino acids, about 4 amino acids to about 6 amino acids, about 6 amino acids to about 100 amino acids, about 6 amino acids to about 90 amino acids, about 6 amino acids to about 80 amino acids, about 6 amino acids to about 70 amino acids, about 6 amino acids to about 60 amino acids, about 6 amino acids to about 50 amino acids, about 6 amino acids to about 45 amino acids, about 6 amino acids to about 40 amino acids, about 6 amino acids to about 35 amino acids, about 6 amino acids to about 30 amino acids, about 6 amino acids to about 25 amino acids, about 6 amino acids to about 24 amino acids, about 6 amino acids to about 22 amino acids, about 6 amino acids to about 20 amino acids, about 6 amino acids to about 18 amino acids, about 6 amino acids to about 16 amino acids, about 6 amino acids to about 14 amino acids, about 6 amino acids to about 12 amino acids, about 6 amino acids to about 10 amino acids, about 6 amino acids to about 8 amino acids, about 8 amino acids to about 100 amino acids, about 8 amino acids to about 90 amino acids, about 8 amino acids to about 80 amino acids, about 8 amino acids to about 70 amino acids, about 8 amino acids to about 60 amino acids, about 8 amino acids to about 50 amino acids, about 8 amino acids to about 45 amino acids, about 8 amino acids to about 40 amino acids, about 8 amino acids to about 35 amino acids, about 8 amino acids to about 30 amino acids, about 8 amino acids to about 25 amino acids, about 8 amino acids to about 24 amino acids, about 8 amino acids to about 22 amino acids, about 8 amino acids to about 20 amino acids, about 8 amino acids to about 18 amino acids, about 8 amino acids to about 16 amino acids, about 8 amino acids to about 14 amino acids, about 8 amino acids to about 12 amino acids, about 8 amino acids to about 10 amino acids, about 10 amino acids to about 100 amino acids, about 10 amino acids to about 90 amino acids, about 10 amino acids to about 80 amino acids, about 10 amino acids to about 70 amino acids, about 10 amino acids to about 60 amino acids, about 10 amino acids to about 50 amino acids, about 10 amino acids to about 45 amino acids, about 10 amino acids to about 40 amino acids, about 10 amino acids to about 35 amino acids, about 10 amino acids to about 30 amino acids, about 10 amino acids to about 25 amino acids, about 10 amino acids to about 24 amino acids, about 10 amino acids to about 22 amino acids, about 10 amino acids to about 20 amino acids, about 10 amino acids to about 18 amino acids, about 10 amino acids to about 16 amino acids, about 10 amino acids to about 14 amino acids, about 10 amino acids to about 12 amino acids, about 12 amino acids to about 100 amino acids, about 12 amino acids to about 90 amino acids, about 12 amino acids to about 80 amino acids, about 12 amino acids to about 70 amino acids, about 12 amino acids to about 60 amino acids, about 12 amino acids to about 50 amino acids, about 12 amino acids to about 45 amino acids, about 12 amino acids to about 40 amino acids, about 12 amino acids to about 35 amino acids, about 12 amino acids to about 30 amino acids, about 12 amino acids to about 25 amino acids, about 12 amino acids to about 24 amino acids, about 12 amino acids to about 22 amino acids, about 12 amino acids to about 20 amino acids, about 12 amino acids to about 18 amino acids, about 12 amino acids to about 16 amino acids, about 12 amino acids to about 14 amino acids, about 14 amino acids to about 100 amino acids, about 14 amino acids to about 90 amino acids, about 14 amino acids to about 80 amino acids, about 14 amino acids to about 70 amino acids, about 14 amino acids to about 60 amino acids, about 14 amino acids to about 50 amino acids, about 14 amino acids to about 45 amino acids, about 14 amino acids to about 40 amino acids, about 14 amino acids to about 35 amino acids, about 14 amino acids to about 30 amino acids, about 14 amino acids to about 25 amino acids, about 14 amino acids to about 24 amino acids, about 14 amino acids to about 22 amino acids, about 14 amino acids to about 20 amino acids, about 14 amino acids to about 18 amino acids, about 14 amino acids to about 16 amino acids, about 16 amino acids to about 100 amino acids, about 16 amino acids to about 90 amino acids, about 16 amino acids to about 80 amino acids, about 16 amino acids to about 70 amino acids, about 16 amino acids to about 60 amino acids, about 16 amino acids to about 50 amino acids, about 16 amino acids to about 45 amino acids, about 16 amino acids to about 40 amino acids, about 16 amino acids to about 35 amino acids, about 16 amino acids to about 30 amino acids, about 16 amino acids to about 25 amino acids, about 16 amino acids to about 24 amino acids, about 16 amino acids to about 22 amino acids, about 16 amino acids to about 20 amino acids, about 16 amino acids to about 18 amino acids, about 18 amino acids to about 100 amino acids, about 18 amino acids to about 90 amino acids, about 18 amino acids to about 80 amino acids, about 18 amino acids to about 70 amino acids, about 18 amino acids to about 60 amino acids, about 18 amino acids to about 50 amino acids, about 18 amino acids to about 45 amino acids, about 18 amino acids to about 40 amino acids, about 18 amino acids to about 35 amino acids, about 18 amino acids to about 30 amino acids, about 18 amino acids to about 25 amino acids, about 18 amino acids to about 24 amino acids, about 18 amino acids to about 22 amino acids, about 18 amino acids to about 20 amino acids, about 20 amino acids to about 100 amino acids, about 20 amino acids to about 90 amino acids, about 20 amino acids to about 80 amino acids, about 20 amino acids to about 70 amino acids, about 20 amino acids to about 60 amino acids, about 20 amino acids to about 50 amino acids, about 20 amino acids to about 45 amino acids, about 20 amino acids to about 40 amino acids, about 20 amino acids to about 35 amino acids, about 20 amino acids to about 30 amino acids, about 20 amino acids to about 25 amino acids, about 20 amino acids to about 24 amino acids, about 20 amino acids to about 22 amino acids, about 22 amino acids to about 100 amino acids, about 22 amino acids to about 90 amino acids, about 22 amino acids to about 80 amino acids, about 22 amino acids to about 70 amino acids, about 22 amino acids to about 60 amino acids, about 22 amino acids to about 50 amino acids, about 22 amino acids to about 45 amino acids, about 22 amino acids to about 40 amino acids, about 22 amino acids to about 35 amino acids, about 22 amino acids to about 30 amino acids, about 22 amino acids to about 25 amino acids, about 22 amino acids to about 24 amino acids, about 25 amino acids to about 100 amino acids, about 25 amino acids to about 90 amino acids, about 25 amino acids to about 80 amino acids, about 25 amino acids to about 70 amino acids, about 25 amino acids to about 60 amino acids, about 25 amino acids to about 50 amino acids, about 25 amino acids to about 45 amino acids, about 25 amino acids to about 40 amino acids, about 25 amino acids to about 35 amino acids, about 25 amino acids to about 30 amino acids, about 30 amino acids to about 100 amino acids, about 30 amino acids to about 90 amino acids, about 30 amino acids to about 80 amino acids, about 30 amino acids to about 70 amino acids, about 30 amino acids to about 60 amino acids, about 30 amino acids to about 50 amino acids, about 30 amino acids to about 45 amino acids, about 30 amino acids to about 40 amino acids, about 30 amino acids to about 35 amino acids, about 35 amino acids to about 100 amino acids, about 35 amino acids to about 90 amino acids, about 35 amino acids to about 80 amino acids, about 35 amino acids to about 70 amino acids, about 35 amino acids to about 60 amino acids, about 35 amino acids to about 50 amino acids, about 35 amino acids to about 45 amino acids, about 35 amino acids to about 40 amino acids, about 40 amino acids to about 100 amino acids, about 40 amino acids to about 90 amino acids, about 40 amino acids to about 80 amino acids, about 40 amino acids to about 70 amino acids, about 40 amino acids to about 60 amino acids, about 40 amino acids to about 50 amino acids, about 40 amino acids to about 45 amino acids, about 45 amino acids to about 100 amino acids, about 45 amino acids to about 90 amino acids, about 45 amino acids to about 80 amino acids, about 45 amino acids to about 70 amino acids, about 45 amino acids to about 60 amino acids, about 45 amino acids to about 50 amino acids, about 50 amino acids to about 100 amino acids, about 50 amino acids to about 90 amino acids, about 50 amino acids to about 80 amino acids, about 50 amino acids to about 70 amino acids, about 50 amino acids to about 60 amino acids, about 60 amino acids to about 100 amino acids, about 60 amino acids to about 90 amino acids, about 60 amino acids to about 80 amino acids, about 60 amino acids to about 70 amino acids, about 70 amino acids to about 100 amino acids, about 70 amino acids to about 90 amino acids, about 70 amino acids to about 80 amino acids, about 80 amino acids to about 100 amino acids, about 80 amino acids to about 90 amino acids, or about 90 amino acids to about 100 amino acids.

[0495] In some embodiments, the linker is rich in glycine (Gly or G) residues. In some embodiments, the linker is rich in serine (Ser or S) residues. In some embodiments, the linker is rich in glycine and serine residues. In some embodiments, the linker has one or more glycine-serine residue pairs (GS), e.g., 1, 2, 3, 4, 5, 6, 7, 8, 9, or 10 or more GS pairs. In some embodiments, the linker has one or more Gly-Gly-Gly-Ser (GGGS) (SEQ ID NO: 99) sequences, e.g., 1, 2, 3, 4, 5, 6, 7, 8, 9, or 10 or more GGGS (SEQ ID NO: 99) sequences. In some embodiments, the linker has one or more Gly-Gly-Gly-Gly-Ser (GGGGS) sequences, e.g., 1, 2, 3, 4, 5, 6, 7, 8, 9, or 10 or more GGGGS (SEQ ID NO: 100) sequences. In some embodiments, the linker has one or more Gly-Gly-Ser-Gly (GGSG) (SEQ ID NO: 101) sequences, e.g., 1, 2, 3, 4, 5, 6, 7, 8, 9, or 10 or more GGSG (SEQ ID NO: 101) sequences.

[0496] In some embodiments, the linker sequence can comprise or consist of GGGGSGGGGSGGGGS (SEQ ID NO: 102). In some embodiments, the linker sequence can be encoded by a nucleic acid comprising or consisting of: GGCGGTGGAGGATCCGGAGGAGGTGGCTCCGGCGGCGGAGGATCT (SEQ ID NO: 103). In some embodiments, the linker sequence can comprise or consist of: GGGSGGGS (SEQ ID NO: 104),

### Target-Binding Domains

[0497] In some embodiments of any of the multi-chain chimeric polypeptides described herein, the first target-binding domain, the second target-binding domain, and/or the additional one or more target-binding domains can be an antigen-binding domain (e.g., any of the exemplary antigen-binding domains described herein or known in the art), a soluble interleukin or cytokine protein (e.g., any of the exemplary soluble interleukin proteins or soluble cytokine proteins described herein), and a soluble interleukin or cytokine receptor (e.g., any of the exemplary soluble interleukin receptors or soluble cytokine receptors described herein).

[0498] In some embodiments of any of the multi-chain chimeric polypeptides described herein, the first target-binding domain, the second target-binding domain, and/or the one or more additional target-binding domains can each independent have a total number of amino acids of about 5 amino acids to about 1000 amino acids, about 5 amino acids to about 950 amino acids, about 5 amino acids to about 900 amino acids, about 5 amino acids to about 850 amino acids, about 5 amino acids to about 800 amino acids, about 5 amino acids to about 750 amino acids, about 5 amino acids to about 700 amino acids, about 5 amino acids to about 650 amino acids, about 5 amino acids to about 600 amino acids, about 5 amino acids to about 550 amino acids, about 5 amino acids to about 500 amino acids, about 5 amino acids to about 450 amino acids, about 5 amino acids to about 400 amino acids, about 5 amino acids to about 350 amino acids, about 5 amino acids to about 300 amino acids, about 5 amino acids to about 280 amino acids, about 5 amino acids to about 260 amino acids, about 5 amino acids to about 240 amino acids, about 5 amino acids to about 220 amino acids, about 5 amino acids to about 200 amino acids, about 5 amino acids to about 195 amino acids, about 5 amino acids to about 190 amino acids, about 5 amino acids to about 185 amino acids, about 5 amino acids to about 180 amino acids, about 5 amino acids to about 175 amino acids, about 5 amino acids to about 170 amino acids, about 5 amino acids to about 165 amino acids, about 5 amino acids to about 160 amino acids, about 5 amino acids to about 155 amino acids, about 5 amino acids to about 150 amino acids, about 5 amino acids to about 145 amino acids, about 5 amino acids to about 140 amino acids, about 5 amino acids to about 135 amino acids, about 5 amino acids to about 130 amino acids, about 5 amino acids to about 125 amino acids, about 5 amino acids to about 120 amino acids, about 5 amino acids to about 115 amino acids, about 5 amino acids to about 110 amino acids, about 5 amino acids to about 105 amino acids, about 5 amino acids to about 100 amino acids, about 5 amino acids to about 95 amino acids, about 5 amino acids to about 90 amino acids, about 5 amino acids to about 85 amino acids, about 5 amino acids to about 80 amino acids, about 5 amino acids to about 75 amino acids, about 5 amino acids to about 70 amino acids, about 5 amino acids to about 65 amino acids, about 5 amino acids to about 60 amino acids, about 5 amino acids to about 55 amino acids, about 5 amino acids to about 50 amino acids, about 5 amino acids to about 45 amino acids, about 5 amino acids to about 40 amino acids, about 5 amino acids to about 35 amino acids, about 5 amino acids to about 30 amino acids, about 5 amino acids to about 25 amino acids, about 5 amino acids to about 20 amino acids, about 5 amino acids to about 15 amino acids, about 5 amino acids to about 10 amino acids, about 10 amino acids to about 1000 amino acids, about 10 amino acids to about 950 amino acids, about 10 amino acids to about 900 amino acids, about 10 amino acids to about 850 amino acids, about 10 amino acids to about 800 amino acids, about 10 amino acids to about 750 amino acids, about 10 amino acids to about 700 amino acids, about 10 amino acids to about 650 amino acids, about 10 amino acids to about 600 amino acids, about 10 amino acids to about 550 amino acids, about 10 amino acids to about 500 amino acids, about 10 amino acids to about 450 amino acids, about 10 amino acids to about 400 amino acids, about 10 amino acids to about 350 amino acids, about 10 amino acids to about 300 amino acids, about 10 amino acids to about 280 amino acids, about 10 amino acids to about 260 amino acids, about 10 amino acids to about 240 amino acids, about 10 amino acids to about 220 amino acids, about 10 amino acids to about 200 amino acids, about 10 amino acids to about 195 amino acids, about 10 amino acids to about 190 amino acids, about 10 amino acids to about 185 amino acids, about 10 amino acids to about 180 amino acids, about 10 amino acids to about 175 amino acids, about 10 amino acids to about 170 amino acids, about 10 amino acids to about 165 amino acids, about 10 amino acids to about 160 amino acids, about 10 amino acids to about 155 amino acids, about 10 amino acids to about 150 amino acids, about 10 amino acids to about 145 amino acids, about 10 amino acids to about 140 amino acids, about 10 amino acids to about 135 amino acids, about 10 amino acids to about 130 amino acids, about 10 amino acids to about 125 amino acids, about 10 amino acids to about 120 amino acids, about 10 amino acids to about 115 amino acids, about 10 amino acids to about 110 amino acids, about 10 amino acids to about 105 amino acids, about 10 amino acids to about 100 amino acids, about 10 amino acids to about 95 amino acids, about 10 amino acids to about 90 amino acids, about 10 amino acids to about 85 amino acids, about 10 amino acids to about 80 amino acids, about 10 amino acids to about 75 amino acids, about 10 amino acids to about 70 amino acids, about 10 amino acids to about 65 amino acids, about 10 amino acids to about 60 amino acids, about 10 amino acids to about 55 amino acids, about 10 amino acids to about 50 amino acids, about 10 amino acids to about 45 amino acids, about 10 amino acids to about 40 amino acids, about 10 amino acids to about 35 amino acids, about 10 amino acids to about 30 amino acids, about 10 amino acids to about 25 amino acids, about 10 amino acids to about 20 amino acids, about 10 amino acids to about 15 amino acids, about 15 amino acids to about 1000 amino acids, about 15 amino acids to about 950 amino acids, about 15 amino acids to about 900 amino acids, about 15 amino acids to about 850 amino acids, about 15 amino acids to about 800 amino acids, about 15 amino acids to about 750 amino acids, about 15 amino acids to about 700 amino acids, about 15 amino acids to about 650 amino acids, about 15 amino acids to about 600 amino acids, about 15 amino acids to about 550 amino acids, about 15 amino acids to about 500 amino acids, about 15 amino acids to about 450 amino acids, about 15 amino acids to about 400 amino acids, about 15 amino acids to about 350 amino acids, about 15 amino acids to about 300 amino acids, about 15 amino acids to about 280 amino acids, about 15 amino acids to about 260 amino acids, about 15 amino acids to about 240 amino acids, about 15 amino acids to about 220 amino acids, about 15 amino acids to about 200 amino acids, about 15 amino acids to about 195 amino acids, about 15 amino acids to about 190 amino acids, about 15 amino acids to about 185 amino acids, about 15 amino acids to about 180 amino acids, about 15 amino acids to about 175 amino acids, about 15 amino acids to about 170 amino acids, about 15 amino acids to about 165 amino acids, about 15 amino acids to about 160 amino acids, about 15 amino acids to about 155 amino acids, about 15 amino acids to about 150 amino acids, about 15 amino acids to about 145 amino acids, about 15 amino acids to about 140 amino acids, about 15 amino acids to about 135 amino acids, about 15 amino acids to about 130 amino acids, about 15 amino acids to about 125 amino acids, about 15 amino acids to about 120 amino acids, about 15 amino acids to about 115 amino acids, about 15 amino acids to about 110 amino acids, about 15 amino acids to about 105 amino acids, about 15 amino acids to about 100 amino acids, about 15 amino acids to about 95 amino acids, about 15 amino acids to about 90 amino acids, about 15 amino acids to about 85 amino acids, about 15 amino acids to about 80 amino acids, about 15 amino acids to about 75 amino acids, about 15 amino acids to about 70 amino acids, about 15 amino acids to about 65 amino acids, about 15 amino acids to about 60 amino acids, about 15 amino acids to about 55 amino acids, about 15 amino acids to about 50 amino acids, about 15 amino acids to about 45 amino acids, about 15 amino acids to about 40 amino acids, about 15 amino acids to about 35 amino acids, about 15 amino acids to about 30 amino acids, about 15 amino acids to about 25 amino acids, about 15 amino acids to about 20 amino acids, about 20 amino acids to about 1000 amino acids, about 20 amino acids to about 950 amino acids, about 20 amino acids to about 900 amino acids, about 20 amino acids to about 850 amino acids, about 20 amino acids to about 800 amino acids, about 20 amino acids to about 750 amino acids, about 20 amino acids to about 700 amino acids, about 20 amino acids to about 650 amino acids, about 20 amino acids to about 600 amino acids, about 20 amino acids to about 550 amino acids, about 20 amino acids to about 500 amino acids, about 20 amino acids to about 450 amino acids, about 20 amino acids to about 400 amino acids, about 20 amino acids to about 350 amino acids, about 20 amino acids to about 300 amino acids, about 20 amino acids to about 280 amino acids, about 20 amino acids to about 260 amino acids, about 20 amino acids to about 240 amino acids, about 20 amino acids to about 220 amino acids, about 20 amino acids to about 200 amino acids, about 20 amino acids to about 195 amino acids, about 20 amino acids to about 190 amino acids, about 20 amino acids to about 185 amino acids, about 20 amino acids to about 180 amino acids, about 20 amino acids to about 175 amino acids, about 20 amino acids to about 170 amino acids, about 20 amino acids to about 165 amino acids, about 20 amino acids to about 160 amino acids, about 20 amino acids to about 155 amino acids, about 20 amino acids to about 150 amino acids, about 20 amino acids to about 145 amino acids, about 20 amino acids to about 140 amino acids, about 20 amino acids to about 135 amino acids, about 20 amino acids to about 130 amino acids, about 20 amino acids to about 125 amino acids, about 20 amino acids to about 120 amino acids, about 20 amino acids to about 115 amino acids, about 20 amino acids to about 110 amino acids, about 20 amino acids to about 105 amino acids, about 20 amino acids to about 100 amino acids, about 20 amino acids to about 95 amino acids, about 20 amino acids to about 90 amino acids, about 20 amino acids to about 85 amino acids, about 20 amino acids to about 80 amino acids, about 20 amino acids to about 75 amino acids, about 20 amino acids to about 70 amino acids, about 20 amino acids to about 65 amino acids, about 20 amino acids to about 60 amino acids, about 20 amino acids to about 55 amino acids, about 20 amino acids to about 50 amino acids, about 20 amino acids to about 45 amino acids, about 20 amino acids to about 40 amino acids, about 20 amino acids to about 35 amino acids, about 20 amino acids to about 30 amino acids, about 20 amino acids to about 25 amino acids, about 25 amino acids to about 1000 amino acids, about 25 amino acids to about 950 amino acids, about 25 amino acids to about 900 amino acids, about 25 amino acids to about 850 amino acids, about 25 amino acids to about 800 amino acids, about 25 amino acids to about 750 amino acids, about 25 amino acids to about 700 amino acids, about 25 amino acids to about 650 amino acids, about 25 amino acids to about 600 amino acids, about 25 amino acids to about 550 amino acids, about 25 amino acids to about 500 amino acids, about 25 amino acids to about 450 amino acids, about 25 amino acids to about 400 amino acids, about 25 amino acids to about 350 amino acids, about 25 amino acids to about 300 amino acids, about 25 amino acids to about 280 amino acids, about 25 amino acids to about 260 amino acids, about 25 amino acids to about 240 amino acids, about 25 amino acids to about 220 amino acids, about 25 amino acids to about 200 amino acids, about 25 amino acids to about 195 amino acids, about 25 amino acids to about 190 amino acids, about 25 amino acids to about 185 amino acids, about 25 amino acids to about 180 amino acids, about 25 amino acids to about 175 amino acids, about 25 amino acids to about 170 amino acids, about 25 amino acids to about 165 amino acids, about 25 amino acids to about 160 amino acids, about 25 amino acids to about 155 amino acids, about 25 amino acids to about 150 amino acids, about 25 amino acids to about 145 amino acids, about 25 amino acids to about 140 amino acids, about 25 amino acids to about 135 amino acids, about 25 amino acids to about 130 amino acids, about 25 amino acids to about 125 amino acids, about 25 amino acids to about 120 amino acids, about 25 amino acids to about 115 amino acids, about 25 amino acids to about 110 amino acids, about 25 amino acids to about 105 amino acids, about 25 amino acids to about 100 amino acids, about 25 amino acids to about 95 amino acids, about 25 amino acids to about 90 amino acids, about 25 amino acids to about 85 amino acids, about 25 amino acids to about 80 amino acids, about 25 amino acids to about 75 amino acids, about 25 amino acids to about 70 amino acids, about 25 amino acids to about 65 amino acids, about 25 amino acids to about 60 amino acids, about 25 amino acids to about 55 amino acids, about 25 amino acids to about 50 amino acids, about 25 amino acids to about 45 amino acids, about 25 amino acids to about 40 amino acids, about 25 amino acids to about 35 amino acids, about 25 amino acids to about 30 amino acids, about 30 amino acids to about 1000 amino acids, about 30 amino acids to about 950 amino acids, about 30 amino acids to about 900 amino acids, about 30 amino acids to about 850 amino acids, about 30 amino acids to about 800 amino acids, about 30 amino acids to about 750 amino acids, about 30 amino acids to about 700 amino acids, about 30 amino acids to about 650 amino acids, about 30 amino acids to about 600 amino acids, about 30 amino acids to about 550 amino acids, about 30 amino acids to about 500 amino acids, about 30 amino acids to about 450 amino acids, about 30 amino acids to about 400 amino acids, about 30 amino acids to about 350 amino acids, about 30 amino acids to about 300 amino acids, about 30 amino acids to about 280 amino acids, about 30 amino acids to about 260 amino acids, about 30 amino acids to about 240 amino acids, about 30 amino acids to about 220 amino acids, about 30 amino acids to about 200 amino acids, about 30 amino acids to about 195 amino acids, about 30 amino acids to about 190 amino acids, about 30 amino acids to about 185 amino acids, about 30 amino acids to about 180 amino acids, about 30 amino acids to about 175 amino acids, about 30 amino acids to about 170 amino acids, about 30 amino acids to about 165 amino acids, about 30 amino acids to about 160 amino acids, about 30 amino acids to about 155 amino acids, about 30 amino acids to about 150 amino acids, about 30 amino acids to about 145 amino acids, about 30 amino acids to about 140 amino acids, about 30 amino acids to about 135 amino acids, about 30 amino acids to about 130 amino acids, about 30 amino acids to about 125 amino acids, about 30 amino acids to about 120 amino acids, about 30 amino acids to about 115 amino acids, about 30 amino acids to about 110 amino acids, about 30 amino acids to about 105 amino acids, about 30 amino acids to about 100 amino acids, about 30 amino acids to about 95 amino acids, about 30 amino acids to about 90 amino acids, about 30 amino acids to about 85 amino acids, about 30 amino acids to about 80 amino acids, about 30 amino acids to about 75 amino acids, about 30 amino acids to about 70 amino acids, about 30 amino acids to about 65 amino acids, about 30 amino acids to about 60 amino acids, about 30 amino acids to about 55 amino acids, about 30 amino acids to about 50 amino acids, about 30 amino acids to about 45 amino acids, about 30 amino acids to about 40 amino acids, about 30 amino acids to about 35 amino acids, about 35 amino acids to about 1000 amino acids, about 35 amino acids to about 950 amino acids, about 35 amino acids to about 900 amino acids, about 35 amino acids to about 850 amino acids, about 35 amino acids to about 800 amino acids, about 35 amino acids to about 750 amino acids, about 35 amino acids to about 700 amino acids, about 35 amino acids to about 650 amino acids, about 35 amino acids to about 600 amino acids, about 35 amino acids to about 550 amino acids, about 35 amino acids to about 500 amino acids, about 35 amino acids to about 450 amino acids, about 35 amino acids to about 400 amino acids, about 35 amino acids to about 350 amino acids, about 35 amino acids to about 300 amino acids, about 35 amino acids to about 280 amino acids, about 35 amino acids to about 260 amino acids, about 35 amino acids to about 240 amino acids, about 35 amino acids to about 220 amino acids, about 35 amino acids to about 200 amino acids, about 35 amino acids to about 195 amino acids, about 35 amino acids to about 190 amino acids, about 35 amino acids to about 185 amino acids, about 35 amino acids to about 180 amino acids, about 35 amino acids to about 175 amino acids, about 35 amino acids to about 170 amino acids, about 35 amino acids to about 165 amino acids, about 35 amino acids to about 160 amino acids, about 35 amino acids to about 155 amino acids, about 35 amino acids to about 150 amino acids, about 35 amino acids to about 145 amino acids, about 35 amino acids to about 140 amino acids, about 35 amino acids to about 135 amino acids, about 35 amino acids to about 130 amino acids, about 35 amino acids to about 125 amino acids, about 35 amino acids to about 120 amino acids, about 35 amino acids to about 115 amino acids, about 35 amino acids to about 110 amino acids, about 35 amino acids to about 105 amino acids, about 35 amino acids to about 100 amino acids, about 35 amino acids to about 95 amino acids, about 35 amino acids to about 90 amino acids, about 35 amino acids to about 85 amino acids, about 35 amino acids to about 80 amino acids, about 35 amino acids to about 75 amino acids, about 35 amino acids to about 70 amino acids, about 35 amino acids to about 65 amino acids, about 35 amino acids to about 60 amino acids, about 35 amino acids to about 55 amino acids, about 35 amino acids to about 50 amino acids, about 35 amino acids to about 45 amino acids, about 35 amino acids to about 40 amino acids, about 40 amino acids to about 1000 amino acids, about 40 amino acids to about 950 amino acids, about 40 amino acids to about 900 amino acids, about 40 amino acids to about 850 amino acids, about 40 amino acids to about 800 amino acids, about 40 amino acids to about 750 amino acids, about 40 amino acids to about 700 amino acids, about 40 amino acids to about 650 amino acids, about 40 amino acids to about 600 amino acids, about 40 amino acids to about 550 amino acids, about 40 amino acids to about 500 amino acids, about 40 amino acids to about 450 amino acids, about 40 amino acids to about 400 amino acids, about 40 amino acids to about 350 amino acids, about 40 amino acids to about 300 amino acids, about 40 amino acids to about 280 amino acids, about 40 amino acids to about 260 amino acids, about 40 amino acids to about 240 amino acids, about 40 amino acids to about 220 amino acids, about 40 amino acids to about 200 amino acids, about 40 amino acids to about 195 amino acids, about 40 amino acids to about 190 amino acids, about 40 amino acids to about 185 amino acids, about 40 amino acids to about 180 amino acids, about 40 amino acids to about 175 amino acids, about 40 amino acids to about 170 amino acids, about 40 amino acids to about 165 amino acids, about 40 amino acids to about 160 amino acids, about 40 amino acids to about 155 amino acids, about 40 amino acids to about 150 amino acids, about 40 amino acids to about 145 amino acids, about 40 amino acids to about 140 amino acids, about 40 amino acids to about 135 amino acids, about 40 amino acids to about 130 amino acids, about 40 amino acids to about 125 amino acids, about 40 amino acids to about 120 amino acids, about 40 amino acids to about 115 amino acids, about 40 amino acids to about 110 amino acids, about 40 amino acids to about 105 amino acids, about 40 amino acids to about 100 amino acids, about 40 amino acids to about 95 amino acids, about 40 amino acids to about 90 amino acids, about 40 amino acids to about 85 amino acids, about 40 amino acids to about 80 amino acids, about 40 amino acids to about 75 amino acids, about 40 amino acids to about 70 amino acids, about 40 amino acids to about 65 amino acids, about 40 amino acids to about 60 amino acids, about 40 amino acids to about 55 amino acids, about 40 amino acids to about 50 amino acids, about 40 amino acids to about 45 amino acids, about 45 amino acids to about 1000 amino acids, about 45 amino acids to about 950 amino acids, about 45 amino acids to about 900 amino acids, about 45 amino acids to about 850 amino acids, about 45 amino acids to about 800 amino acids, about 45 amino acids to about 750 amino acids, about 45 amino acids to about 700 amino acids, about 45 amino acids to about 650 amino acids, about 45 amino acids to about 600 amino acids, about 45 amino acids to about 550 amino acids, about 45 amino acids to about 500 amino acids, about 45 amino acids to about 450 amino acids, about 45 amino acids to about 400 amino acids, about 45 amino acids to about 350 amino acids, about 45 amino acids to about 300 amino acids, about 45 amino acids to about 280 amino acids, about 45 amino acids to about 260 amino acids, about 45 amino acids to about 240 amino acids, about 45 amino acids to about 220 amino acids, about 45 amino acids to about 200 amino acids, about 45 amino acids to about 195 amino acids, about 45 amino acids to about 190 amino acids, about 45 amino acids to about 185 amino acids, about 45 amino acids to about 180 amino acids, about 45 amino acids to about 175 amino acids, about 45 amino acids to about 170 amino acids, about 45 amino acids to about 165 amino acids, about 45 amino acids to about 160 amino acids, about 45 amino acids to about 155 amino acids, about 45 amino acids to about 150 amino acids, about 45 amino acids to about 145 amino acids, about 45 amino acids to about 140 amino acids, about 45 amino acids to about 135 amino acids, about 45 amino acids to about 130 amino acids, about 45 amino acids to about 125 amino acids, about 45 amino acids to about 120 amino acids, about 45 amino acids to about 115 amino acids, about 45 amino acids to about 110 amino acids, about 45 amino acids to about 105 amino acids, about 45 amino acids to about 100 amino acids, about 45 amino acids to about 95 amino acids, about 45 amino acids to about 90 amino acids, about 45 amino acids to about 85 amino acids, about 45 amino acids to about 80 amino acids, about 45 amino acids to about 75 amino acids, about 45 amino acids to about 70 amino acids, about 45 amino acids to about 65 amino acids, about 45 amino acids to about 60 amino acids, about 45 amino acids to about 55 amino acids, about 45 amino acids to about 50 amino acids, about 50 amino acids to about 1000 amino acids, about 50 amino acids to about 950 amino acids, about 50 amino acids to about 900 amino acids, about 50 amino acids to about 850 amino acids, about 50 amino acids to about 800 amino acids, about 50 amino acids to about 750 amino acids, about 50 amino acids to about 700 amino acids, about 50 amino acids to about 650 amino acids, about 50 amino acids to about 600 amino acids, about 50 amino acids to about 550 amino acids, about 50 amino acids to about 500 amino acids, about 50 amino acids to about 450 amino acids, about 50 amino acids to about 400 amino acids, about 50 amino acids to about 350 amino acids, about 50 amino acids to about 300 amino acids, about 50 amino acids to about 280 amino acids, about 50 amino acids to about 260 amino acids, about 50 amino acids to about 240 amino acids, about 50 amino acids to about 220 amino acids, about 50 amino acids to about 200 amino acids, about 50 amino acids to about 195 amino acids, about 50 amino acids to about 190 amino acids, about 50 amino acids to about 185 amino acids, about 50 amino acids to about 180 amino acids, about 50 amino acids to about 175 amino acids, about 50 amino acids to about 170 amino acids, about 50 amino acids to about 165 amino acids, about 50 amino acids to about 160 amino acids, about 50 amino acids to about 155 amino acids, about 50 amino acids to about 150 amino acids, about 50 amino acids to about 145 amino acids, about 50 amino acids to about 140 amino acids, about 50 amino acids to about 135 amino acids, about 50 amino acids to about 130 amino acids, about 50 amino acids to about 125 amino acids, about 50 amino acids to about 120 amino acids, about 50 amino acids to about 115 amino acids, about 50 amino acids to about 110 amino acids, about 50 amino acids to about 105 amino acids, about 50 amino acids to about 100 amino acids, about 50 amino acids to about 95 amino acids, about 50 amino acids to about 90 amino acids, about 50 amino acids to about 85 amino acids, about 50 amino acids to about 80 amino acids, about 50 amino acids to about 75 amino acids, about 50 amino acids to about 70 amino acids, about 50 amino acids to about 65 amino acids, about 50 amino acids to about 60 amino acids, about 50 amino acids to about 55 amino acids, about 55 amino acids to about 1000 amino acids, about 55 amino acids to about 950 amino acids, about 55 amino acids to about 900 amino acids, about 55 amino acids to about 850 amino acids, about 55 amino acids to about 800 amino acids, about 55 amino acids to about 750 amino acids, about 55 amino acids to about 700 amino acids, about 55 amino acids to about 650 amino acids, about 55 amino acids to about 600 amino acids, about 55 amino acids to about 550 amino acids, about 55 amino acids to about 500 amino acids, about 55 amino acids to about 450 amino acids, about 55 amino acids to about 400 amino acids, about 55 amino acids to about 350 amino acids, about 55 amino acids to about 300 amino acids, about 55 amino acids to about 280 amino acids, about 55 amino acids to about 260 amino acids, about 55 amino acids to about 240 amino acids, about 55 amino acids to about 220 amino acids, about 55 amino acids to about 200 amino acids, about 55 amino acids to about 195 amino acids, about 55 amino acids to about 190 amino acids, about 55 amino acids to about 185 amino acids, about 55 amino acids to about 180 amino acids, about 55 amino acids to about 175 amino acids, about 55 amino acids to about 170 amino acids, about 55 amino acids to about 165 amino acids, about 55 amino acids to about 160 amino acids, about 55 amino acids to about 155 amino acids, about 55 amino acids to about 150 amino acids, about 55 amino acids to about 145 amino acids, about 55 amino acids to about 140 amino acids, about 55 amino acids to about 135 amino acids, about 55 amino acids to about 130 amino acids, about 55 amino acids to about 125 amino acids, about 55 amino acids to about 120 amino acids, about 55 amino acids to about 115 amino acids, about 55 amino acids to about 110 amino acids, about 55 amino acids to about 105 amino acids, about 55 amino acids to about 100 amino acids, about 55 amino acids to about 95 amino acids, about 55 amino acids to about 90 amino acids, about 55 amino acids to about 85 amino acids, about 55 amino acids to about 80 amino acids, about 55 amino acids to about 75 amino acids, about 55 amino acids to about 70 amino acids, about 55 amino acids to about 65 amino acids, about 55 amino acids to about 60 amino acids, about 60 amino acids to about 1000 amino acids, about 60 amino acids to about 950 amino acids, about 60 amino acids to about 900 amino acids, about 60 amino acids to about 850 amino acids, about 60 amino acids to about 800 amino acids, about 60 amino acids to about 750 amino acids, about 60 amino acids to about 700 amino acids, about 60 amino acids to about 650 amino acids, about 60 amino acids to about 600 amino acids, about 60 amino acids to about 550 amino acids, about 60 amino acids to about 500 amino acids, about 60 amino acids to about 450 amino acids, about 60 amino acids to about 400 amino acids, about 60 amino acids to about 350 amino acids, about 60 amino acids to about 300 amino acids, about 60 amino acids to about 280 amino acids, about 60 amino acids to about 260 amino acids, about 60 amino acids to about 240 amino acids, about 60 amino acids to about 220 amino acids, about 60 amino acids to about 200 amino acids, about 60 amino acids to about 195 amino acids, about 60 amino acids to about 190 amino acids, about 60 amino acids to about 185 amino acids, about 60 amino acids to about 180 amino acids, about 60 amino acids to about 175 amino acids, about 60 amino acids to about 170 amino acids, about 60 amino acids to about 165 amino acids, about 60 amino acids to about 160 amino acids, about 60 amino acids to about 155 amino acids, about 60 amino acids to about 150 amino acids, about 60 amino acids to about 145 amino acids, about 60 amino acids to about 140 amino acids, about 60 amino acids to about 135 amino acids, about 60 amino acids to about 130 amino acids, about 60 amino acids to about 125 amino acids, about 60 amino acids to about 120 amino acids, about 60 amino acids to about 115 amino acids, about 60 amino acids to about 110 amino acids, about 60 amino acids to about 105 amino acids, about 60 amino acids to about 100 amino acids, about 60 amino acids to about 95 amino acids, about 60 amino acids to about 90 amino acids, about 60 amino acids to about 85 amino acids, about 60 amino acids to about 80 amino acids, about 60 amino acids to about 75 amino acids, about 60 amino acids to about 70 amino acids, about 60 amino acids to about 65 amino acids, about 65 amino acids to about 1000 amino acids, about 65 amino acids to about 950 amino acids, about 65 amino acids to about 900 amino acids, about 65 amino acids to about 850 amino acids, about 65 amino acids to about 800 amino acids, about 65 amino acids to about 750 amino acids, about 65 amino acids to about 700 amino acids, about 65 amino acids to about 650 amino acids, about 65 amino acids to about 600 amino acids, about 65 amino acids to about 550 amino acids, about 65 amino acids to about 500 amino acids, about 65 amino acids to about 450 amino acids, about 65 amino acids to about 400 amino acids, about 65 amino acids to about 350 amino acids, about 65 amino acids to about 300 amino acids, about 65 amino acids to about 280 amino acids, about 65 amino acids to about 260 amino acids, about 65 amino acids to about 240 amino acids, about 65 amino acids to about 220 amino acids, about 65 amino acids to about 200 amino acids, about 65 amino acids to about 195 amino acids, about 65 amino acids to about 190 amino acids, about 65 amino acids to about 185 amino acids, about 65 amino acids to about 180 amino acids, about 65 amino acids to about 175 amino acids, about 65 amino acids to about 170 amino acids, about 65 amino acids to about 165 amino acids, about 65 amino acids to about 160 amino acids, about 65 amino acids to about 155 amino acids, about 65 amino acids to about 150 amino acids, about 65 amino acids to about 145 amino acids, about 65 amino acids to about 140 amino acids, about 65 amino acids to about 135 amino acids, about 65 amino acids to about 130 amino acids, about 65 amino acids to about 125 amino acids, about 65 amino acids to about 120 amino acids, about 65 amino acids to about 115 amino acids, about 65 amino acids to about 110 amino acids, about 65 amino acids to about 105 amino acids, about 65 amino acids to about 100 amino acids, about 65 amino acids to about 95 amino acids, about 65 amino acids to about 90 amino acids, about 65 amino acids to about 85 amino acids, about 65 amino acids to about 80 amino acids, about 65 amino acids to about 75 amino acids, about 65 amino acids to about 70 amino acids, about 70 amino acids to about 1000 amino acids, about 70 amino acids to about 950 amino acids, about 70 amino acids to about 900 amino acids, about 70 amino acids to about 850 amino acids, about 70 amino acids to about 800 amino acids, about 70 amino acids to about 750 amino acids, about 70 amino acids to about 700 amino acids, about 70 amino acids to about 650 amino acids, about 70 amino acids to about 600 amino acids, about 70 amino acids to about 550 amino acids, about 70 amino acids to about 500 amino acids, about 70 amino acids to about 450 amino acids, about 70 amino acids to about 400 amino acids, about 70 amino acids to about 350 amino acids, about 70 amino acids to about 300 amino acids, about 70 amino acids to about 280 amino acids, about 70 amino acids to about 260 amino acids, about 70 amino acids to about 240 amino acids, about 70 amino acids to about 220 amino acids, about 70 amino acids to about 200 amino acids, about 70 amino acids to about 195 amino acids, about 70 amino acids to about 190 amino acids, about 70 amino acids to about 185 amino acids, about 70 amino acids to about 180 amino acids, about 70 amino acids to about 175 amino acids, about 70 amino acids to about 170 amino acids, about 70 amino acids to about 165 amino acids, about 70 amino acids to about 160 amino acids, about 70 amino acids to about 155 amino acids, about 70 amino acids to about 150 amino acids, about 70 amino acids to about 145 amino acids, about 70 amino acids to about 140 amino acids, about 70 amino acids to about 135 amino acids, about 70 amino acids to about 130 amino acids, about 70 amino acids to about 125 amino acids, about 70 amino acids to about 120 amino acids, about 70 amino acids to about 115 amino acids, about 70 amino acids to about 110 amino acids, about 70 amino acids to about 105 amino acids, about 70 amino acids to about 100 amino acids, about 70 amino acids to about 95 amino acids, about 70 amino acids to about 90 amino acids, about 70 amino acids to about 85 amino acids, about 70 amino acids to about 80 amino acids, about 70 amino acids to about 75 amino acids, about 75 amino acids to about 1000 amino acids, about 75 amino acids to about 950 amino acids, about 75 amino acids to about 900 amino acids, about 75 amino acids to about 850 amino acids, about 75 amino acids to about 800 amino acids, about 75 amino acids to about 750 amino acids, about 75 amino acids to about 700 amino acids, about 75 amino acids to about 650 amino acids, about 75 amino acids to about 600 amino acids, about 75 amino acids to about 550 amino acids, about 75 amino acids to about 500 amino acids, about 75 amino acids to about 450 amino acids, about 75 amino acids to about 400 amino acids, about 75 amino acids to about 350 amino acids, about 75 amino acids to about 300 amino acids, about 75 amino acids to about 280 amino acids, about 75 amino acids to about 260 amino acids, about 75 amino acids to about 240 amino acids, about 75 amino acids to about 220 amino acids, about 75 amino acids to about 200 amino acids, about 75 amino acids to about 195 amino acids, about 75 amino acids to about 190 amino acids, about 75 amino acids to about 185 amino acids, about 75 amino acids to about 180 amino acids, about 75 amino acids to about 175 amino acids, about 75 amino acids to about 170 amino acids, about 75 amino acids to about 165 amino acids, about 75 amino acids to about 160 amino acids, about 75 amino acids to about 155 amino acids, about 75 amino acids to about 150 amino acids, about 75 amino acids to about 145 amino acids, about 75 amino acids to about 140 amino acids, about 75 amino acids to about 135 amino acids, about 75 amino acids to about 130 amino acids, about 75 amino acids to about 125 amino acids, about 75 amino acids to about 120 amino acids, about 75 amino acids to about 115 amino acids, about 75 amino acids to about 110 amino acids, about 75 amino acids to about 105 amino acids, about 75 amino acids to about 100 amino acids, about 75 amino acids to about 95 amino acids, about 75 amino acids to about 90 amino acids, about 75 amino acids to about 85 amino acids, about 75 amino acids to about 80 amino acids, about 80 amino acids to about 1000 amino acids, about 80 amino acids to about 950 amino acids, about 80 amino acids to about 900 amino acids, about 80 amino acids to about 850 amino acids, about 80 amino acids to about 800 amino acids, about 80 amino acids to about 750 amino acids, about 80 amino acids to about 700 amino acids, about 80 amino acids to about 650 amino acids, about 80 amino acids to about 600 amino acids, about 80 amino acids to about 550 amino acids, about 80 amino acids to about 500 amino acids, about 80 amino acids to about 450 amino acids, about 80 amino acids to about 400 amino acids, about 80 amino acids to about 350 amino acids, about 80 amino acids to about 300 amino acids, about 80 amino acids to about 280 amino acids, about 80 amino acids to about 260 amino acids, about 80 amino acids to about 240 amino acids, about 80 amino acids to about 220 amino acids, about 80 amino acids to about 200 amino acids, about 80 amino acids to about 195 amino acids, about 80 amino acids to about 190 amino acids, about 80 amino acids to about 185 amino acids, about 80 amino acids to about 180 amino acids, about 80 amino acids to about 175 amino acids, about 80 amino acids to about 170 amino acids, about 80 amino acids to about 165 amino acids, about 80 amino acids to about 160 amino acids, about 80 amino acids to about 155 amino acids, about 80 amino acids to about 150 amino acids, about 80 amino acids to about 145 amino acids, about 80 amino acids to about 140 amino acids, about 80 amino acids to about 135 amino acids, about 80 amino acids to about 130 amino acids, about 80 amino acids to about 125 amino acids, about 80 amino acids to about 120 amino acids, about 80 amino acids to about 115 amino acids, about 80 amino acids to about 110 amino acids, about 80 amino acids to about 105 amino acids, about 80 amino acids to about 100 amino acids, about 80 amino acids to about 95 amino acids, about 80 amino acids to about 90 amino acids, about 80 amino acids to about 85 amino acids, about 85 amino acids to about 1000 amino acids, about 85 amino acids to about 950 amino acids, about 85 amino acids to about 900 amino acids, about 85 amino acids to about 850 amino acids, about 85 amino acids to about 800 amino acids, about 85 amino acids to about 750 amino acids, about 85 amino acids to about 700 amino acids, about 85 amino acids to about 650 amino acids, about 85 amino acids to about 600 amino acids, about 85 amino acids to about 550 amino acids, about 85 amino acids to about 500 amino acids, about 85 amino acids to about 450 amino acids, about 85 amino acids to about 400 amino acids, about 85 amino acids to about 350 amino acids, about 85 amino acids to about 300 amino acids, about 85 amino acids to about 280 amino acids, about 85 amino acids to about 260 amino acids, about 85 amino acids to about 240 amino acids, about 85 amino acids to about 220 amino acids, about 85 amino acids to about 200 amino acids, about 85 amino acids to about 195 amino acids, about 85 amino acids to about 190 amino acids, about 85 amino acids to about 185 amino acids, about 85 amino acids to about 180 amino acids, about 85 amino acids to about 175 amino acids, about 85 amino acids to about 170 amino acids, about 85 amino acids to about 165 amino acids, about 85 amino acids to about 160 amino acids, about 85 amino acids to about 155 amino acids, about 85 amino acids to about 150 amino acids, about 85 amino acids to about 145 amino acids, about 85 amino acids to about 140 amino acids, about 85 amino acids to about 135 amino acids, about 85 amino acids to about 130 amino acids, about 85 amino acids to about 125 amino acids, about 85 amino acids to about 120 amino acids, about 85 amino acids to about 115 amino acids, about 85 amino acids to about 110 amino acids, about 85 amino acids to about 105 amino acids, about 85 amino acids to about 100 amino acids, about 85 amino acids to about 95 amino acids, about 85 amino acids to about 90 amino acids, about 90 amino acids to about 1000 amino acids, about 90 amino acids to about 950 amino acids, about 90 amino acids to about 900 amino acids, about 90 amino acids to about 850 amino acids, about 90 amino acids to about 800 amino acids, about 90 amino acids to about 750 amino acids, about 90 amino acids to about 700 amino acids, about 90 amino acids to about 650 amino acids, about 90 amino acids to about 600 amino acids, about 90 amino acids to about 550 amino acids, about 90 amino acids to about 500 amino acids, about 90 amino acids to about 450 amino acids, about 90 amino acids to about 400 amino acids, about 90 amino acids to about 350 amino acids, about 90 amino acids to about 300 amino acids, about 90 amino acids to about 280 amino acids, about 90 amino acids to about 260 amino acids, about 90 amino acids to about 240 amino acids, about 90 amino acids to about 220 amino acids, about 90 amino acids to about 200 amino acids, about 90 amino acids to about 195 amino acids, about 90 amino acids to about 190 amino acids, about 90 amino acids to about 185 amino acids, about 90 amino acids to about 180 amino acids, about 90 amino acids to about 175 amino acids, about 90 amino acids to about 170 amino acids, about 90 amino acids to about 165 amino acids, about 90 amino acids to about 160 amino acids, about 90 amino acids to about 155 amino acids, about 90 amino acids to about 150 amino acids, about 90 amino acids to about 145 amino acids, about 90 amino acids to about 140 amino acids, about 90 amino acids to about 135 amino acids, about 90 amino acids to about 130 amino acids, about 90 amino acids to about 125 amino acids, about 90 amino acids to about 120 amino acids, about 90 amino acids to about 115 amino acids, about 90 amino acids to about 110 amino acids, about 90 amino acids to about 105 amino acids, about 90 amino acids to about 100 amino acids, about 90 amino acids to about 95 amino acids, about 95 amino acids to about 1000 amino acids, about 95 amino acids to about 950 amino acids, about 95 amino acids to about 900 amino acids, about 95 amino acids to about 850 amino acids, about 95 amino acids to about 800 amino acids, about 95 amino acids to about 750 amino acids, about 95 amino acids to about 700 amino acids, about 95 amino acids to about 650 amino acids, about 95 amino acids to about 600 amino acids, about 95 amino acids to about 550 amino acids, about 95 amino acids to about 500 amino acids, about 95 amino acids to about 450 amino acids, about 95 amino acids to about 400 amino acids, about 95 amino acids to about 350 amino acids, about 95 amino acids to about 300 amino acids, about 95 amino acids to about 280 amino acids, about 95 amino acids to about 260 amino acids, about 95 amino acids to about 240 amino acids, about 95 amino acids to about 220 amino acids, about 95 amino acids to about 200 amino acids, about 95 amino acids to about 195 amino acids, about 95 amino acids to about 190 amino acids, about 95 amino acids to about 185 amino acids, about 95 amino acids to about 180 amino acids, about 95 amino acids to about 175 amino acids, about 95 amino acids to about 170 amino acids, about 95 amino acids to about 165 amino acids, about 95 amino acids to about 160 amino acids, about 95 amino acids to about 155 amino acids, about 95 amino acids to about 150 amino acids, about 95 amino acids to about 145 amino acids, about 95 amino acids to about 140 amino acids, about 95 amino acids to about 135 amino acids, about 95 amino acids to about 130 amino acids, about 95 amino acids to about 125 amino acids, about 95 amino acids to about 120 amino acids, about 95 amino acids to about 115 amino acids, about 95 amino acids to about 110 amino acids, about 95 amino acids to about 105 amino acids, about 95 amino acids to about 100 amino acids, about 100 amino acids to about 1000 amino acids, about 100 amino acids to about 950 amino acids, about 100 amino acids to about 900 amino acids, about 100 amino acids to about 850 amino acids, about 100 amino acids to about 800 amino acids, about 100 amino acids to about 750 amino acids, about 100 amino acids to about 700 amino acids, about 100 amino acids to about 650 amino acids, about 100 amino acids to about 600 amino acids, about 100 amino acids to about 550 amino acids, about 100 amino acids to about 500 amino acids, about 100 amino acids to about 450 amino acids, about 100 amino acids to about 400 amino acids, about 100 amino acids to about 350 amino acids, about 100 amino acids to about 300 amino acids, about 100 amino acids to about 280 amino acids, about 100 amino acids to about 260 amino acids, about 100 amino acids to about 240 amino acids, about 100 amino acids to about 220 amino acids, about 100 amino acids to about 200 amino acids, about 100 amino acids to about 195 amino acids, about 100 amino acids to about 190 amino acids, about 100 amino acids to about 185 amino acids, about 100 amino acids to about 180 amino acids, about 100 amino acids to about 175 amino acids, about 100 amino acids to about 170 amino acids, about 100 amino acids to about 165 amino acids, about 100 amino acids to about 160 amino acids, about 100 amino acids to about 155 amino acids, about 100 amino acids to about 150 amino acids, about 100 amino acids to about 145 amino acids, about 100 amino acids to about 140 amino acids, about 100 amino acids to about 135 amino acids, about 100 amino acids to about 130 amino acids, about 100 amino acids to about 125 amino acids, about 100 amino acids to about 120 amino acids, about 100 amino acids to about 115 amino acids, about 100 amino acids to about 110 amino acids, about 100 amino acids to about 105 amino acids, about 105 amino acids to about 1000 amino acids, about 105 amino acids to about 950 amino acids, about 105 amino acids to about 900 amino acids, about 105 amino acids to about 850 amino acids, about 105 amino acids to about 800 amino acids, about 105 amino acids to about 750 amino acids, about 105 amino acids to about 700 amino acids, about 105 amino acids to about 650 amino acids, about 105 amino acids to about 600 amino acids, about 105 amino acids to about 550 amino acids, about 105 amino acids to about 500 amino acids, about 105 amino acids to about 450 amino acids, about 105 amino acids to about 400 amino acids, about 105 amino acids to about 350 amino acids, about 105 amino acids to about 300 amino acids, about 105 amino acids to about 280 amino acids, about 105 amino acids to about 260 amino acids, about 105 amino acids to about 240 amino acids, about 105 amino acids to about 220 amino acids, about 105 amino acids to about 200 amino acids, about 105 amino acids to about 195 amino acids, about 105 amino acids to about 190 amino acids, about 105 amino acids to about 185 amino acids, about 105 amino acids to about 180 amino acids, about 105 amino acids to about 175 amino acids, about 105 amino acids to about 170 amino acids, about 105 amino acids to about 165 amino acids, about 105 amino acids to about 160 amino acids, about 105 amino acids to about 155 amino acids, about 105 amino acids to about 150 amino acids, about 105 amino acids to about 145 amino acids, about 105 amino acids to about 140 amino acids, about 105 amino acids to about 135 amino acids, about 105 amino acids to about 130 amino acids, about 105 amino acids to about 125 amino acids, about 105 amino acids to about 120 amino acids, about 105 amino acids to about 115 amino acids, about 105 amino acids to about 110 amino acids, about 110 amino acids to about 1000 amino acids, about 110 amino acids to about 950 amino acids, about 110 amino acids to about 900 amino acids, about 110 amino acids to about 850 amino acids, about 110 amino acids to about 800 amino acids, about 110 amino acids to about 750 amino acids, about 110 amino acids to about 700 amino acids, about 110 amino acids to about 650 amino acids, about 110 amino acids to about 600 amino acids, about 110 amino acids to about 550 amino acids, about 110 amino acids to about 500 amino acids, about 110 amino acids to about 450 amino acids, about 110 amino acids to about 400 amino acids, about 110 amino acids to about 350 amino acids, about 110 amino acids to about 300 amino acids, about 110 amino acids to about 280 amino acids, about 110 amino acids to about 260 amino acids, about 110 amino acids to about 240 amino acids, about 110 amino acids to about 220 amino acids, about 110 amino acids to about 200 amino acids, about 110 amino acids to about 195 amino acids, about 110 amino acids to about 190 amino acids, about 110 amino acids to about 185 amino acids, about 110 amino acids to about 180 amino acids, about 110 amino acids to about 175 amino acids, about 110 amino acids to about 170 amino acids, about 110 amino acids to about 165 amino acids, about 110 amino acids to about 160 amino acids, about 110 amino acids to about 155 amino acids, about 110 amino acids to about 150 amino acids, about 110 amino acids to about 145 amino acids, about 110 amino acids to about 140 amino acids, about 110 amino acids to about 135 amino acids, about 110 amino acids to about 130 amino acids, about 110 amino acids to about 125 amino acids, about 110 amino acids to about 120 amino acids, about 110 amino acids to about 115 amino acids, about 115 amino acids to about 1000 amino acids, about 115 amino acids to about 950 amino acids, about 115 amino acids to about 900 amino acids, about 115 amino acids to about 850 amino acids, about 115 amino acids to about 800 amino acids, about 115 amino acids to about 750 amino acids, about 115 amino acids to about 700 amino acids, about 115 amino acids to about 650 amino acids, about 115 amino acids to about 600 amino acids, about 115 amino acids to about 550 amino acids, about 115 amino acids to about 500 amino acids, about 115 amino acids to about 450 amino acids, about 115 amino acids to about 400 amino acids, about 115 amino acids to about 350 amino acids, about 115 amino acids to about 300 amino acids, about 115 amino acids to about 280 amino acids, about 115 amino acids to about 260 amino acids, about 115 amino acids to about 240 amino acids, about 115 amino acids to about 220 amino acids, about 115 amino acids to about 200 amino acids, about 115 amino acids to about 195 amino acids, about 115 amino acids to about 190 amino acids, about 115 amino acids to about 185 amino acids, about 115 amino acids to about 180 amino acids, about 115 amino acids to about 175 amino acids, about 115 amino acids to about 170 amino acids, about 115 amino acids to about 165 amino acids, about 115 amino acids to about 160 amino acids, about 115 amino acids to about 155 amino acids, about 115 amino acids to about 150 amino acids, about 115 amino acids to about 145 amino acids, about 115 amino acids to about 140 amino acids, about 115 amino acids to about 135 amino acids, about 115 amino acids to about 130 amino acids, about 115 amino acids to about 125 amino acids, about 115 amino acids to about 120 amino acids, about 120 amino acids to about 1000 amino acids, about 120 amino acids to about 950 amino acids, about 120 amino acids to about 900 amino acids, about 120 amino acids to about 850 amino acids, about 120 amino acids to about 800 amino acids, about 120 amino acids to about 750 amino acids, about 120 amino acids to about 700 amino acids, about 120 amino acids to about 650 amino acids, about 120 amino acids to about 600 amino acids, about 120 amino acids to about 550 amino acids, about 120 amino acids to about 500 amino acids, about 120 amino acids to about 450 amino acids, about 120 amino acids to about 400 amino acids, about 120 amino acids to about 350 amino acids, about 120 amino acids to about 300 amino acids, about 120 amino acids to about 280 amino acids, about 120 amino acids to about 260 amino acids, about 120 amino acids to about 240 amino acids, about 120 amino acids to about 220 amino acids, about 120 amino acids to about 200 amino acids, about 120 amino acids to about 195 amino acids, about 120 amino acids to about 190 amino acids, about 120 amino acids to about 185 amino acids, about 120 amino acids to about 180 amino acids, about 120 amino acids to about 175 amino acids, about 120 amino acids to about 170 amino acids, about 120 amino acids to about 165 amino acids, about 120 amino acids to about 160 amino acids, about 120 amino acids to about 155 amino acids, about 120 amino acids to about 150 amino acids, about 120 amino acids to about 145 amino acids, about 120 amino acids to about 140 amino acids, about 120 amino acids to about 135 amino acids, about 120 amino acids to about 130 amino acids, about 120 amino acids to about 125 amino acids, about 125 amino acids to about 1000 amino acids, about 125 amino acids to about 950 amino acids, about 125 amino acids to about 900 amino acids, about 125 amino acids to about 850 amino acids, about 125 amino acids to about 800 amino acids, about 125 amino acids to about 750 amino acids, about 125 amino acids to about 700 amino acids, about 125 amino acids to about 650 amino acids, about 125 amino acids to about 600 amino acids, about 125 amino acids to about 550 amino acids, about 125 amino acids to about 500 amino acids, about 125 amino acids to about 450 amino acids, about 125 amino acids to about 400 amino acids, about 125 amino acids to about 350 amino acids, about 125 amino acids to about 300 amino acids, about 125 amino acids to about 280 amino acids, about 125 amino acids to about 260 amino acids, about 125 amino acids to about 240 amino acids, about 125 amino acids to about 220 amino acids, about 125 amino acids to about 200 amino acids, about 125 amino acids to about 195 amino acids, about 125 amino acids to about 190 amino acids, about 125 amino acids to about 185 amino acids, about 125 amino acids to about 180 amino acids, about 125 amino acids to about 175 amino acids, about 125 amino acids to about 170 amino acids, about 125 amino acids to about 165 amino acids, about 125 amino acids to about 160 amino acids, about 125 amino acids to about 155 amino acids, about 125 amino acids to about 150 amino acids, about 125 amino acids to about 145 amino acids, about 125 amino acids to about 140 amino acids, about 125 amino acids to about 135 amino acids, about 125 amino acids to about 130 amino acids, about 130 amino acids to about 1000 amino acids, about 130 amino acids to about 950 amino acids, about 130 amino acids to about 900 amino acids, about 130 amino acids to about 850 amino acids, about 130 amino acids to about 800 amino acids, about 130 amino acids to about 750 amino acids, about 130 amino acids to about 700 amino acids, about 130 amino acids to about 650 amino acids, about 130 amino acids to about 600 amino acids, about 130 amino acids to about 550 amino acids, about 130 amino acids to about 500 amino acids, about 130 amino acids to about 450 amino acids, about 130 amino acids to about 400 amino acids, about 130 amino acids to about 350 amino acids, about 130 amino acids to about 300 amino acids, about 130 amino acids to about 280 amino acids, about 130 amino acids to about 260 amino acids, about 130 amino acids to about 240 amino acids, about 130 amino acids to about 220 amino acids, about 130 amino acids to about 200 amino acids, about 130 amino acids to about 195 amino acids, about 130 amino acids to about 190 amino acids, about 130 amino acids to about 185 amino acids, about 130 amino acids to about 180 amino acids, about 130 amino acids to about 175 amino acids, about 130 amino acids to about 170 amino acids, about 130 amino acids to about 165 amino acids, about 130 amino acids to about 160 amino acids, about 130 amino acids to about 155 amino acids, about 130 amino acids to about 150 amino acids, about 130 amino acids to about 145 amino acids, about 130 amino acids to about 140 amino acids, about 130 amino acids to about 135 amino acids, about 135 amino acids to about 1000 amino acids, about 135 amino acids to about 950 amino acids, about 135 amino acids to about 900 amino acids, about 135 amino acids to about 850 amino acids, about 135 amino acids to about 800 amino acids, about 135 amino acids to about 750 amino acids, about 135 amino acids to about 700 amino acids, about 135 amino acids to about 650 amino acids, about 135 amino acids to about 600 amino acids, about 135 amino acids to about 550 amino acids, about 135 amino acids to about 500 amino acids, about 135 amino acids to about 450 amino acids, about 135 amino acids to about 400 amino acids, about 135 amino acids to about 350 amino acids, about 135 amino acids to about 300 amino acids, about 135 amino acids to about 280 amino acids, about 135 amino acids to about 260 amino acids, about 135 amino acids to about 240 amino acids, about 135 amino acids to about 220 amino acids, about 135 amino acids to about 200 amino acids, about 135 amino acids to about 195 amino acids, about 135 amino acids to about 190 amino acids, about 135 amino acids to about 185 amino acids, about 135 amino acids to about 180 amino acids, about 135 amino acids to about 175 amino acids, about 135 amino acids to about 170 amino acids, about 135 amino acids to about 165 amino acids, about 135 amino acids to about 160 amino acids, about 135 amino acids to about 155 amino acids, about 135 amino acids to about 150 amino acids, about 135 amino acids to about 145 amino acids, about 135 amino acids to about 140 amino acids, about 140 amino acids to about 1000 amino acids, about 140 amino acids to about 950 amino acids, about 140 amino acids to about 900 amino acids, about 140 amino acids to about 850 amino acids, about 140 amino acids to about 800 amino acids, about 140 amino acids to about 750 amino acids, about 140 amino acids to about 700 amino acids, about 140 amino acids to about 650 amino acids, about 140 amino acids to about 600 amino acids, about 140 amino acids to about 550 amino acids, about 140 amino acids to about 500 amino acids, about 140 amino acids to about 450 amino acids, about 140 amino acids to about 400 amino acids, about 140 amino acids to about 350 amino acids, about 140 amino acids to about 300 amino acids, about 140 amino acids to about 280 amino acids, about 140 amino acids to about 260 amino acids, about 140 amino acids to about 240 amino acids, about 140 amino acids to about 220 amino acids, about 140 amino acids to about 200 amino acids, about 140 amino acids to about 195 amino acids, about 140 amino acids to about 190 amino acids, about 140 amino acids to about 185 amino acids, about 140 amino acids to about 180 amino acids, about 140 amino acids to about 175 amino acids, about 140 amino acids to about 170 amino acids, about 140 amino acids to about 165 amino acids, about 140 amino acids to about 160 amino acids, about 140 amino acids to about 155 amino acids, about 140 amino acids to about 150 amino acids, about 140 amino acids to about 145 amino acids, about 145 amino acids to about 1000 amino acids, about 145 amino acids to about 950 amino acids, about 145 amino acids to about 900 amino acids, about 145 amino acids to about 850 amino acids, about 145 amino acids to about 800 amino acids, about 145 amino acids to about 750 amino acids, about 145 amino acids to about 700 amino acids, about 145 amino acids to about 650 amino acids, about 145 amino acids to about 600 amino acids, about 145 amino acids to about 550 amino acids, about 145 amino acids to about 500 amino acids, about 145 amino acids to about 450 amino acids, about 145 amino acids to about 400 amino acids, about 145 amino acids to about 350 amino acids, about 145 amino acids to about 300 amino acids, about 145 amino acids to about 280 amino acids, about 145 amino acids to about 260 amino acids, about 145 amino acids to about 240 amino acids, about 145 amino acids to about 220 amino acids, about 145 amino acids to about 200 amino acids, about 145 amino acids to about 195 amino acids, about 145 amino acids to about 190 amino acids, about 145 amino acids to about 185 amino acids, about 145 amino acids to about 180 amino acids, about 145 amino acids to about 175 amino acids, about 145 amino acids to about 170 amino acids, about 145 amino acids to about 165 amino acids, about 145 amino acids to about 160 amino acids, about 145 amino acids to about 155 amino acids, about 145 amino acids to about 150 amino acids, about 150 amino acids to about 1000 amino acids, about 150 amino acids to about 950 amino acids, about 150 amino acids to about 900 amino acids, about 150 amino acids to about 850 amino acids, about 150 amino acids to about 800 amino acids, about 150 amino acids to about 750 amino acids, about 150 amino acids to about 700 amino acids, about 150 amino acids to about 650 amino acids, about 150 amino acids to about 600 amino acids, about 150 amino acids to about 550 amino acids, about 150 amino acids to about 500 amino acids, about 150 amino acids to about 450 amino acids, about 150 amino acids to about 400 amino acids, about 150 amino acids to about 350 amino acids, about 150 amino acids to about 300 amino acids, about 150 amino acids to about 280 amino acids, about 150 amino acids to about 260 amino acids, about 150 amino acids to about 240 amino acids, about 150 amino acids to about 220 amino acids, about 150 amino acids to about 200 amino acids, about 150 amino acids to about 195 amino acids, about 150 amino acids to about 190 amino acids, about 150 amino acids to about 185 amino acids, about 150 amino acids to about 180 amino acids, about 150 amino acids to about 175 amino acids, about 150 amino acids to about 170 amino acids, about 150 amino acids to about 165 amino acids, about 150 amino acids to about 160 amino acids, about 150 amino acids to about 155 amino acids, about 155 amino acids to about 1000 amino acids, about 155 amino acids to about 950 amino acids, about 155 amino acids to about 900 amino acids, about 155 amino acids to about 850 amino acids, about 155 amino acids to about 800 amino acids, about 155 amino acids to about 750 amino acids, about 155 amino acids to about 700 amino acids, about 155 amino acids to about 650 amino acids, about 155 amino acids to about 600 amino acids, about 155 amino acids to about 550 amino acids, about 155 amino acids to about 500 amino acids, about 155 amino acids to about 450 amino acids, about 155 amino acids to about 400 amino acids, about 155 amino acids to about 350 amino acids, about 155 amino acids to about 300 amino acids, about 155 amino acids to about 280 amino acids, about 155 amino acids to about 260 amino acids, about 155 amino acids to about 240 amino acids, about 155 amino acids to about 220 amino acids, about 155 amino acids to about 200 amino acids, about 155 amino acids to about 195 amino acids, about 155 amino acids to about 190 amino acids, about 155 amino acids to about 185 amino acids, about 155 amino acids to about 180 amino acids, about 155 amino acids to about 175 amino acids, about 155 amino acids to about 170 amino acids, about 155 amino acids to about 165 amino acids, about 155 amino acids to about 160 amino acids, about 160 amino acids to about 1000 amino acids, about 160 amino acids to about 950 amino acids, about 160 amino acids to about 900 amino acids, about 160 amino acids to about 850 amino acids, about 160 amino acids to about 800 amino acids, about 160 amino acids to about 750 amino acids, about 160 amino acids to about 700 amino acids, about 160 amino acids to about 650 amino acids, about 160 amino acids to about 600 amino acids, about 160 amino acids to about 550 amino acids, about 160 amino acids to about 500 amino acids, about 160 amino acids to about 450 amino acids, about 160 amino acids to about 400 amino acids, about 160 amino acids to about 350 amino acids, about 160 amino acids to about 300 amino acids, about 160 amino acids to about 280 amino acids, about 160 amino acids to about 260 amino acids, about 160 amino acids to about 240 amino acids, about 160 amino acids to about 220 amino acids, about 160 amino acids to about 200 amino acids, about 160 amino acids to about 195 amino acids, about 160 amino acids to about 190 amino acids, about 160 amino acids to about 185 amino acids, about 160 amino acids to about 180 amino acids, about 160 amino acids to about 175 amino acids, about 160 amino acids to about 170 amino acids, about 160 amino acids to about 165 amino acids, about 165 amino acids to about 1000 amino acids, about 165 amino acids to about 950 amino acids, about 165 amino acids to about 900 amino acids, about 165 amino acids to about 850 amino acids, about 165 amino acids to about 800 amino acids, about 165 amino acids to about 750 amino acids, about 165 amino acids to about 700 amino acids, about 165 amino acids to about 650 amino acids, about 165 amino acids to about 600 amino acids, about 165 amino acids to about 550 amino acids, about 165 amino acids to about 500 amino acids, about 165 amino acids to about 450 amino acids, about 165 amino acids to about 400 amino acids, about 165 amino acids to about 350 amino acids, about 165 amino acids to about 300 amino acids, about 165 amino acids to about 280 amino acids, about 165 amino acids to about 260 amino acids, about 165 amino acids to about 240 amino acids, about 165 amino acids to about 220 amino acids, about 165 amino acids to about 200 amino acids, about 165 amino acids to about 195 amino acids, about 165 amino acids to about 190 amino acids, about 165 amino acids to about 185 amino acids, about 165 amino acids to about 180 amino acids, about 165 amino acids to about 175 amino acids, about 165 amino acids to about 170 amino acids, about 170 amino acids to about 1000 amino acids, about 170 amino acids to about 950 amino acids, about 170 amino acids to about 900 amino acids, about 170 amino acids to about 850 amino acids, about 170 amino acids to about 800 amino acids, about 170 amino acids to about 750 amino acids, about 170 amino acids to about 700 amino acids, about 170 amino acids to about 650 amino acids, about 170 amino acids to about 600 amino acids, about 170 amino acids to about 550 amino acids, about 170 amino acids to about 500 amino acids, about 170 amino acids to about 450 amino acids, about 170 amino acids to about 400 amino acids, about 170 amino acids to about 350 amino acids, about 170 amino acids to about 300 amino acids, about 170 amino acids to about 280 amino acids, about 170 amino acids to about 260 amino acids, about 170 amino acids to about 240 amino acids, about 170 amino acids to about 220 amino acids, about 170 amino acids to about 200 amino acids, about 170 amino acids to about 195 amino acids, about 170 amino acids to about 190 amino acids, about 170 amino acids to about 185 amino acids, about 170 amino acids to about 180 amino acids, about 170 amino acids to about 175 amino acids, about 175 amino acids to about 1000 amino acids, about 175 amino acids to about 950 amino acids, about 175 amino acids to about 900 amino acids, about 175 amino acids to about 850 amino acids, about 175 amino acids to about 800 amino acids, about 175 amino acids to about 750 amino acids, about 175 amino acids to about 700 amino acids, about 175 amino acids to about 650 amino acids, about 175 amino acids to about 600 amino acids, about 175 amino acids to about 550 amino acids, about 175 amino acids to about 500 amino acids, about 175 amino acids to about 450 amino acids, about 175 amino acids to about 400 amino acids, about 175 amino acids to about 350 amino acids, about 175 amino acids to about 300 amino acids, about 175 amino acids to about 280 amino acids, about 175 amino acids to about 260 amino acids, about 175 amino acids to about 240 amino acids, about 175 amino acids to about 220 amino acids, about 175 amino acids to about 200 amino acids, about 175 amino acids to about 195 amino acids, about 175 amino acids to about 190 amino acids, about 175 amino acids to about 185 amino acids, about 175 amino acids to about 180 amino acids, about 180 amino acids to about 1000 amino acids, about 180 amino acids to about 950 amino acids, about 180 amino acids to about 900 amino acids, about 180 amino acids to about 850 amino acids, about 180 amino acids to about 800 amino acids, about 180 amino acids to about 750 amino acids, about 180 amino acids to about 700 amino acids, about 180 amino acids to about 650 amino acids, about 180 amino acids to about 600 amino acids, about 180 amino acids to about 550 amino acids, about 180 amino acids to about 500 amino acids, about 180 amino acids to about 450 amino acids, about 180 amino acids to about 400 amino acids, about 180 amino acids to about 350 amino acids, about 180 amino acids to about 300 amino acids, about 180 amino acids to about 280 amino acids, about 180 amino acids to about 260 amino acids, about 180 amino acids to about 240 amino acids, about 180 amino acids to about 220 amino acids, about 180 amino acids to about 200 amino acids, about 180 amino acids to about 195 amino acids, about 180 amino acids to about 190 amino acids, about 180 amino acids to about 185 amino acids, about 185 amino acids to about 1000 amino acids, about 185 amino acids to about 950 amino acids, about 185 amino acids to about 900 amino acids, about 185 amino acids to about 850 amino acids, about 185 amino acids to about 800 amino acids, about 185 amino acids to about 750 amino acids, about 185 amino acids to about 700 amino acids, about 185 amino acids to about 650 amino acids, about 185 amino acids to about 600 amino acids, about 185 amino acids to about 550 amino acids, about 185 amino acids to about 500 amino acids, about 185 amino acids to about 450 amino acids, about 185 amino acids to about 400 amino acids, about 185 amino acids to about 350 amino acids, about 185 amino acids to about 300 amino acids, about 185 amino acids to about 280 amino acids, about 185 amino acids to about 260 amino acids, about 185 amino acids to about 240 amino acids, about 185 amino acids to about 220 amino acids, about 185 amino acids to about 200 amino acids, about 185 amino acids to about 195 amino acids, about 185 amino acids to about 190 amino acids, about 190 amino acids to about 1000 amino acids, about 190 amino acids to about 950 amino acids, about 190 amino acids to about 900 amino acids, about 190 amino acids to about 850 amino acids, about 190 amino acids to about 800 amino acids, about 190 amino acids to about 750 amino acids, about 190 amino acids to about 700 amino acids, about 190 amino acids to about 650 amino acids, about 190 amino acids to about 600 amino acids, about 190 amino acids to about 550 amino acids, about 190 amino acids to about 500 amino acids, about 190 amino acids to about 450 amino acids, about 190 amino acids to about 400 amino acids, about 190 amino acids to about 350 amino acids, about 190 amino acids to about 300 amino acids, about 190 amino acids to about 280 amino acids, about 190 amino acids to about 260 amino acids, about 190 amino acids to about 240 amino acids, about 190 amino acids to about 220 amino acids, about 190 amino acids to about 200 amino acids, about 190 amino acids to about 195 amino acids, about 195 amino acids to about 1000 amino acids, about 195 amino acids to about 950 amino acids, about 195 amino acids to about 900 amino acids, about 195 amino acids to about 850 amino acids, about 195 amino acids to about 800 amino acids, about 195 amino acids to about 750 amino acids, about 195 amino acids to about 700 amino acids, about 195 amino acids to about 650 amino acids, about 195 amino acids to about 600 amino acids, about 195 amino acids to about 550 amino acids, about 195 amino acids to about 500 amino acids, about 195 amino acids to about 450 amino acids, about 195 amino acids to about 400 amino acids, about 195 amino acids to about 350 amino acids, about 195 amino acids to about 300 amino acids, about 195 amino acids to about 280 amino acids, about 195 amino acids to about 260 amino acids, about 195 amino acids to about 240 amino acids, about 195 amino acids to about 220 amino acids, about 195 amino acids to about 200 amino acids, about 200 amino acids to about 1000 amino acids, about 200 amino acids to about 950 amino acids, about 200 amino acids to about 900 amino acids, about 200 amino acids to about 850 amino acids, about 200 amino acids to about 800 amino acids, about 200 amino acids to about 750 amino acids, about 200 amino acids to about 700 amino acids, about 200 amino acids to about 650 amino acids, about 200 amino acids to about 600 amino acids, about 200 amino acids to about 550 amino acids, about 200 amino acids to about 500 amino acids, about 200 amino acids to about 450 amino acids, about 200 amino acids to about 400 amino acids, about 200 amino acids to about 350 amino acids, about 200 amino acids to about 300 amino acids, about 200 amino acids to about 280 amino acids, about 200 amino acids to about 260 amino acids, about 200 amino acids to about 240 amino acids, about 200 amino acids to about 220 amino acids, about 220 amino acids to about 1000 amino acids, about 220 amino acids to about 950 amino acids, about 220 amino acids to about 900 amino acids, about 220 amino acids to about 850 amino acids, about 220 amino acids to about 800 amino acids, about 220 amino acids to about 750 amino acids, about 220 amino acids to about 700 amino acids, about 220 amino acids to about 650 amino acids, about 220 amino acids to about 600 amino acids, about 220 amino acids to about 550 amino acids, about 220 amino acids to about 500 amino acids, about 220 amino acids to about 450 amino acids, about 220 amino acids to about 400 amino acids, about 220 amino acids to about 350 amino acids, about 220 amino acids to about 300 amino acids, about 220 amino acids to about 280 amino acids, about 220 amino acids to about 260 amino acids, about 220 amino acids to about 240 amino acids, about 240 amino acids to about 1000 amino acids, about 240 amino acids to about 950 amino acids, about 240 amino acids to about 900 amino acids, about 240 amino acids to about 850 amino acids, about 240 amino acids to about 800 amino acids, about 240 amino acids to about 750 amino acids, about 240 amino acids to about 700 amino acids, about 240 amino acids to about 650 amino acids, about 240 amino acids to about 600 amino acids, about 240 amino acids to about 550 amino acids, about 240 amino acids to about 500 amino acids, about 240 amino acids to about 450 amino acids, about 240 amino acids to about 400 amino acids, about 240 amino acids to about 350 amino acids, about 240 amino acids to about 300 amino acids, about 240 amino acids to about 280 amino acids, about 240 amino acids to about 260 amino acids, about 260 amino acids to about 1000 amino acids, about 260 amino acids to about 950 amino acids, about 260 amino acids to about 900 amino acids, about 260 amino acids to about 850 amino acids, about 260 amino acids to about 800 amino acids, about 260 amino acids to about 750 amino acids, about 260 amino acids to about 700 amino acids, about 260 amino acids to about 650 amino acids, about 260 amino acids to about 600 amino acids, about 260 amino acids to about 550 amino acids, about 260 amino acids to about 500 amino acids, about 260 amino acids to about 450 amino acids, about 260 amino acids to about 400 amino acids, about 260 amino acids to about 350 amino acids, about 260 amino acids to about 300 amino acids, about 260 amino acids to about 280 amino acids, about 280 amino acids to about 1000 amino acids, about 280 amino acids to about 950 amino acids, about 280 amino acids to about 900 amino acids, about 280 amino acids to about 850 amino acids, about 280 amino acids to about 800 amino acids, about 280 amino acids to about 750 amino acids, about 280 amino acids to about 700 amino acids, about 280 amino acids to about 650 amino acids, about 280 amino acids to about 600 amino acids, about 280 amino acids to about 550 amino acids, about 280 amino acids to about 500 amino acids, about 280 amino acids to about 450 amino acids, about 280 amino acids to about 400 amino acids, about 280 amino acids to about 350 amino acids, about 280 amino acids to about 300 amino acids, about 300 amino acids to about 1000 amino acids, about 300 amino acids to about 950 amino acids, about 300 amino acids to about 900 amino acids, about 300 amino acids to about 850 amino acids, about 300 amino acids to about 800 amino acids, about 300 amino acids to about 750 amino acids, about 300 amino acids to about 700 amino acids, about 300 amino acids to about 650 amino acids, about 300 amino acids to about 600 amino acids, about 300 amino acids to about 550 amino acids, about 300 amino acids to about 500 amino acids, about 300 amino acids to about 450 amino acids, about 300 amino acids to about 400 amino acids, about 300 amino acids to about 350 amino acids, about 350 amino acids to about 1000 amino acids, about 350 amino acids to about 950 amino acids, about 350 amino acids to about 900 amino acids, about 350 amino acids to about 850 amino acids, about 350 amino acids to about 800 amino acids, about 350 amino acids to about 750 amino acids, about 350 amino acids to about 700 amino acids, about 350 amino acids to about 650 amino acids, about 350 amino acids to about 600 amino acids, about 350 amino acids to about 550 amino acids, about 350 amino acids to about 500 amino acids, about 350 amino acids to about 450 amino acids, about 350 amino acids to about 400 amino acids, about 400 amino acids to about 1000 amino acids, about 400 amino acids to about 950 amino acids, about 400 amino acids to about 900 amino acids, about 400 amino acids to about 850 amino acids, about 400 amino acids to about 800 amino acids, about 400 amino acids to about 750 amino acids, about 400 amino acids to about 700 amino acids, about 400 amino acids to about 650 amino acids, about 400 amino acids to about 600 amino acids, about 400 amino acids to about 550 amino acids, about 400 amino acids to about 500 amino acids, about 400 amino acids to about 450 amino acids, about 450 amino acids to about 1000 amino acids, about 450 amino acids to about 950 amino acids, about 450 amino acids to about 900 amino acids, about 450 amino acids to about 850 amino acids, about 450 amino acids to about 800 amino acids, about 450 amino acids to about 750 amino acids, about 450 amino acids to about 700 amino acids, about 450 amino acids to about 650 amino acids, about 450 amino acids to about 600 amino acids, about 450 amino acids to about 550 amino acids, about 450 amino acids to about 500 amino acids, about 500 amino acids to about 1000 amino acids, about 500 amino acids to about 950 amino acids, about 500 amino acids to about 900 amino acids, about 500 amino acids to about 850 amino acids, about 500 amino acids to about 800 amino acids, about 500 amino acids to about 750 amino acids, about 500 amino acids to about 700 amino acids, about 500 amino acids to about 650 amino acids, about 500 amino acids to about 600 amino acids, about 500 amino acids to about 550 amino acids, about 550 amino acids to about 1000 amino acids, about 550 amino acids to about 950 amino acids, about 550 amino acids to about 900 amino acids, about 550 amino acids to about 850 amino acids, about 550 amino acids to about 800 amino acids, about 550 amino acids to about 750 amino acids, about 550 amino acids to about 700 amino acids, about 550 amino acids to about 650 amino acids, about 550 amino acids to about 600 amino acids, about 600 amino acids to about 1000 amino acids, about 600 amino acids to about 950 amino acids, about 600 amino acids to about 900 amino acids, about 600 amino acids to about 850 amino acids, about 600 amino acids to about 800 amino acids, about 600 amino acids to about 750 amino acids, about 600 amino acids to about 700 amino acids, about 600 amino acids to about 650 amino acids, about 650 amino acids to about 1000 amino acids, about 650 amino acids to about 950 amino acids, about 650 amino acids to about 900 amino acids, about 650 amino acids to about 850 amino acids, about 650 amino acids to about 800 amino acids, about 650 amino acids to about 750 amino acids, about 650 amino acids to about 700 amino acids, about 700 amino acids to about 1000 amino acids, about 700 amino acids to about 950 amino acids, about 700 amino acids to about 900 amino acids, about 700 amino acids to about 850 amino acids, about 700 amino acids to about 800 amino acids, about 700 amino acids to about 750 amino acids, about 750 amino acids to about 1000 amino acids, about 750 amino acids to about 950 amino acids, about 750 amino acids to about 900 amino acids, about 750 amino acids to about 850 amino acids, about 750 amino acids to about 800 amino acids, about 800 amino acids to about 1000 amino acids, about 800 amino acids to about 950 amino acids, about 800 amino acids to about 900 amino acids, about 800 amino acids to about 850 amino acids, about 850 amino acids to about 1000 amino acids, about 850 amino acids to about 950 amino acids, about 850 amino acids to about 900 amino acids, about 900 amino acids to about 1000 amino acids, about 900 amino acids to about 950 amino acids, or about 950 amino acids to about 1000 amino acids.

[0499] Any of the target-binding domains described herein can bind to its target with a dissociation equilibrium constant (K_{D}) of less than 1×10⁻⁷M, less than 1×10⁻⁸M, less than 1×10⁻⁹M, less than 1×10⁻¹⁰ M, less than 1×10⁻¹¹M, less than 1×10⁻¹²M, or less than 1×10¹³ M. In some embodiments, the antigen-binding protein construct provided herein can bind to an identifying antigen with a K_{D} of about 1×10⁻³M to about 1×10⁻⁵ M, about 1×10⁻⁴M to about 1×10⁻⁶M, about 1×10⁻⁵M to about 1×10⁻⁷M, about 1×10⁻⁶M to about 1×10⁻⁸M, about 1×10⁻⁷M to about 1×10⁻⁹M, about 1×10⁻⁸M to about 1×10⁻¹⁰ M, or about 1×10⁻⁹M to about 1×10⁻¹¹M (inclusive).

[0500] Any of the target-binding domains described herein can bind to its target with a K_{D} of between about 1 pM to about 30 nM (e.g., about 1 pM to about 25 nM, about 1 pM to about 20 nM, about 1 pM to about 15 nM, about 1 pM to about 10 nM, about 1 pM to about 5 nM, about 1 pM to about 2 nM, about 1 pM to about 1 nM, about 1 pM to about 950 pM, about 1 pM to about 900 pM, about 1 pM to about 850 pM, about 1 pM to about 800 pM, about 1 pM to about 750 pM, about 1 pM to about 700 pM, about 1 pM to about 650 pM, about 1 pM to about 600 pM, about 1 pM to about 550 pM, about 1 pM to about 500 pM, about 1 pM to about 450 pM, about 1 pM to about 400 pM, about 1 pM to about 350 pM, about 1 pM to about 300 pM, about 1 pM to about 250 pM, about 1 pM to about 200 pM, about 1 pM to about 150 pM, about 1 pM to about 100 pM, about 1 pM to about 90 pM, about 1 pM to about 80 pM, about 1 pM to about 70 pM, about 1 pM to about 60 pM, about 1 pM to about 50 pM, about 1 pM to about 40 pM, about 1 pM to about 30 pM, about 1 pM to about 20 pM, about 1 pM to about 10 pM, about 1 pM to about 5 pM, about 1 pM to about 4 pM, about 1 pM to about 3 pM, about 1 pM to about 2 pM, about 2 pM to about 30 nM, about 2 pM to about 25 nM, about 2 pM to about 20 nM, about 2 pM to about 15 nM, about 2 pM to about 10 nM, about 2 pM to about 5 nM, about 2 pM to about 2 nM, about 2 pM to about 1 nM, about 2 pM to about 950 pM, about 2 pM to about 900 pM, about 2 pM to about 850 pM, about 2 pM to about 800 pM, about 2 pM to about 750 pM, about 2 pM to about 700 pM, about 2 pM to about 650 pM, about 2 pM to about 600 pM, about 2 pM to about 550 pM, about 2 pM to about 500 pM, about 2 pM to about 450 pM, about 2 pM to about 400 pM, about 2 pM to about 350 pM, about 2 pM to about 300 pM, about 2 pM to about 250 pM, about 2 pM to about 200 pM, about 2 pM to about 150 pM, about 2 pM to about 100 pM, about 2 pM to about 90 pM, about 2 pM to about 80 pM, about 2 pM to about 70 pM, about 2 pM to about 60 pM, about 2 pM to about 50 pM, about 2 pM to about 40 pM, about 2 pM to about 30 pM, about 2 pM to about 20 pM, about 2 pM to about 10 pM, about 2 pM to about 5 pM, about 2 pM to about 4 pM, about 2 pM to about 3 pM, about 5 pM to about 30 nM, about 5 pM to about 25 nM, about 5 pM to about 20 nM, about 5 pM to about 15 nM, about 5 pM to about 10 nM, about 5 pM to about 5 nM, about 5 pM to about 2 nM, about 5 pM to about 1 nM, about 5 pM to about 950 pM, about 5 pM to about 900 pM, about 5 pM to about 850 pM, about 5 pM to about 800 pM, about 5 pM to about 750 pM, about 5 pM to about 700 pM, about 5 pM to about 650 pM, about 5 pM to about 600 pM, about 5 pM to about 550 pM, about 5 pM to about 500 pM, about 5 pM to about 450 pM, about 5 pM to about 400 pM, about 5 pM to about 350 pM, about 5 pM to about 300 pM, about 5 pM to about 250 pM, about 5 pM to about 200 pM, about 5 pM to about 150 pM, about 5 pM to about 100 pM, about 5 pM to about 90 pM, about 5 pM to about 80 pM, about 5 pM to about 70 pM, about 5 pM to about 60 pM, about 5 pM to about 50 pM, about 5 pM to about 40 pM, about 5 pM to about 30 pM, about 5 pM to about 20 pM, about 5 pM to about 10 pM, about 10 pM to about 30 nM, about 10 pM to about 25 nM, about 10 pM to about 20 nM, about 10 pM to about 15 nM, about 10 pM to about 10 nM, about 10 pM to about 5 nM, about 10 pM to about 2 nM, about 10 pM to about 1 nM, about 10 pM to about 950 pM, about 10 pM to about 900 pM, about 10 pM to about 850 pM, about 10 pM to about 800 pM, about 10 pM to about 750 pM, about 10 pM to about 700 pM, about 10 pM to about 650 pM, about 10 pM to about 600 pM, about 10 pM to about 550 pM, about 10 pM to about 500 pM, about 10 pM to about 450 pM, about 10 pM to about 400 pM, about 10 pM to about 350 pM, about 10 pM to about 300 pM, about 10 pM to about 250 pM, about 10 pM to about 200 pM, about 10 pM to about 150 pM, about 10 pM to about 100 pM, about 10 pM to about 90 pM, about 10 pM to about 80 pM, about 10 pM to about 70 pM, about 10 pM to about 60 pM, about 10 pM to about 50 pM, about 10 pM to about 40 pM, about 10 pM to about 30 pM, about 10 pM to about 20 pM, about 15 pM to about 30 nM, about 15 pM to about 25 nM, about 15 pM to about 20 nM, about 15 pM to about 15 nM, about 15 pM to about 10 nM, about 15 pM to about 5 nM, about 15 pM to about 2 nM, about 15 pM to about 1 nM, about 15 pM to about 950 pM, about 15 pM to about 900 pM, about 15 pM to about 850 pM, about 15 pM to about 800 pM, about 15 pM to about 750 pM, about 15 pM to about 700 pM, about 15 pM to about 650 pM, about 15 pM to about 600 pM, about 15 pM to about 550 pM, about 15 pM to about 500 pM, about 15 pM to about 450 pM, about 15 pM to about 400 pM, about 15 pM to about 350 pM, about 15 pM to about 300 pM, about 15 pM to about 250 pM, about 15 pM to about 200 pM, about 15 pM to about 150 pM, about 15 pM to about 100 pM, about 15 pM to about 90 pM, about 15 pM to about 80 pM, about 15 pM to about 70 pM, about 15 pM to about 60 pM, about 15 pM to about 50 pM, about 15 pM to about 40 pM, about 15 pM to about 30 pM, about 15 pM to about 20 pM, about 20 pM to about 30 nM, about 20 pM to about 25 nM, about 20 pM to about 20 nM, about 20 pM to about 15 nM, about 20 pM to about 10 nM, about 20 pM to about 5 nM, about 20 pM to about 2 nM, about 20 pM to about 1 nM, about 20 pM to about 950 pM, about 20 pM to about 900 pM, about 20 pM to about 850 pM, about 20 pM to about 800 pM, about 20 pM to about 750 pM, about 20 pM to about 700 pM, about 20 pM to about 650 pM, about 20 pM to about 600 pM, about 20 pM to about 550 pM, about 20 pM to about 500 pM, about 20 pM to about 450 pM, about 20 pM to about 400 pM, about 20 pM to about 350 pM, about 20 pM to about 300 pM, about 20 pM to about 250 pM, about 20 pM to about 20 pM, about 200 pM to about 150 pM, about 20 pM to about 100 pM, about 20 pM to about 90 pM, about 20 pM to about 80 pM, about 20 pM to about 70 pM, about 20 pM to about 60 pM, about 20 pM to about 50 pM, about 20 pM to about 40 pM, about 20 pM to about 30 pM, about 30 pM to about 30 nM, about 30 pM to about 25 nM, about 30 pM to about 30 nM, about 30 pM to about 15 nM, about 30 pM to about 10 nM, about 30 pM to about 5 nM, about 30 pM to about 2 nM, about 30 pM to about 1 nM, about 30 pM to about 950 pM, about 30 pM to about 900 pM, about 30 pM to about 850 pM, about 30 pM to about 800 pM, about 30 pM to about 750 pM, about 30 pM to about 700 pM, about 30 pM to about 650 pM, about 30 pM to about 600 pM, about 30 pM to about 550 pM, about 30 pM to about 500 pM, about 30 pM to about 450 pM, about 30 pM to about 400 pM, about 30 pM to about 350 pM, about 30 pM to about 300 pM, about 30 pM to about 250 pM, about 30 pM to about 200 pM, about 30 pM to about 150 pM, about 30 pM to about 100 pM, about 30 pM to about 90 pM, about 30 pM to about 80 pM, about 30 pM to about 70 pM, about 30 pM to about 60 pM, about 30 pM to about 50 pM, about 30 pM to about 40 pM, about 40 pM to about 30 nM, about 40 pM to about 25 nM, about 40 pM to about 30 nM, about 40 pM to about 15 nM, about 40 pM to about 10 nM, about 40 pM to about 5 nM, about 40 pM to about 2 nM, about 40 pM to about 1 nM, about 40 pM to about 950 pM, about 40 pM to about 900 pM, about 40 pM to about 850 pM, about 40 pM to about 800 pM, about 40 pM to about 750 pM, about 40 pM to about 700 pM, about 40 pM to about 650 pM, about 40 pM to about 600 pM, about 40 pM to about 550 pM, about 40 pM to about 500 pM, about 40 pM to about 450 pM, about 40 pM to about 400 pM, about 40 pM to about 350 pM, about 40 pM to about 300 pM, about 40 pM to about 250 pM, about 40 pM to about 200 pM, about 40 pM to about 150 pM, about 40 pM to about 100 pM, about 40 pM to about 90 pM, about 40 pM to about 80 pM, about 40 pM to about 70 pM, about 40 pM to about 60 pM, about 40 pM to about 50 pM, about 50 pM to about 30 nM, about 50 pM to about 25 nM, about 50 pM to about 30 nM, about 50 pM to about 15 nM, about 50 pM to about 10 nM, about 50 pM to about 5 nM, about 50 pM to about 2 nM, about 50 pM to about 1 nM, about 50 pM to about 950 pM, about 50 pM to about 900 pM, about 50 pM to about 850 pM, about 50 pM to about 800 pM, about 50 pM to about 750 pM, about 50 pM to about 700 pM, about 50 pM to about 650 pM, about 50 pM to about 600 pM, about 50 pM to about 550 pM, about 50 pM to about 500 pM, about 50 pM to about 450 pM, about 50 pM to about 400 pM, about 50 pM to about 350 pM, about 50 pM to about 300 pM, about 50 pM to about 250 pM, about 50 pM to about 200 pM, about 50 pM to about 150 pM, about 50 pM to about 100 pM, about 50 pM to about 90 pM, about 50 pM to about 80 pM, about 50 pM to about 70 pM, about 50 pM to about 60 pM, about 60 pM to about 30 nM, about 60 pM to about 25 nM, about 60 pM to about 30 nM, about 60 pM to about 15 nM, about 60 pM to about 10 nM, about 60 pM to about 5 nM, about 60 pM to about 2 nM, about 60 pM to about 1 nM, about 60 pM to about 950 pM, about 60 pM to about 900 pM, about 60 pM to about 850 pM, about 60 pM to about 800 pM, about 60 pM to about 750 pM, about 60 pM to about 700 pM, about 60 pM to about 650 pM, about 60 pM to about 600 pM, about 60 pM to about 550 pM, about 60 pM to about 500 pM, about 60 pM to about 450 pM, about 60 pM to about 400 pM, about 60 pM to about 350 pM, about 60 pM to about 300 pM, about 60 pM to about 250 pM, about 60 pM to about 200 pM, about 60 pM to about 150 pM, about 60 pM to about 100 pM, about 60 pM to about 90 pM, about 60 pM to about 80 pM, about 60 pM to about 70 pM, about 70 pM to about 30 nM, about 70 pM to about 25 nM, about 70 pM to about 30 nM, about 70 pM to about 15 nM, about 70 pM to about 10 nM, about 70 pM to about 5 nM, about 70 pM to about 2 nM, about 70 pM to about 1 nM, about 70 pM to about 950 pM, about 70 pM to about 900 pM, about 70 pM to about 850 pM, about 70 pM to about 800 pM, about 70 pM to about 750 pM, about 70 pM to about 700 pM, about 70 pM to about 650 pM, about 70 pM to about 600 pM, about 70 pM to about 550 pM, about 70 pM to about 500 pM, about 70 pM to about 450 pM, about 70 pM to about 400 pM, about 70 pM to about 350 pM, about 70 pM to about 300 pM, about 70 pM to about 250 pM, about 70 pM to about 200 pM, about 70 pM to about 150 pM, about 70 pM to about 100 pM, about 70 pM to about 90 pM, about 70 pM to about 80 pM, about 80 pM to about 30 nM, about 80 pM to about 25 nM, about 80 pM to about 30 nM, about 80 pM to about 15 nM, about 80 pM to about 10 nM, about 80 pM to about 5 nM, about 80 pM to about 2 nM, about 80 pM to about 1 nM, about 80 pM to about 950 pM, about 80 pM to about 900 pM, about 80 pM to about 850 pM, about 80 pM to about 800 pM, about 80 pM to about 750 pM, about 80 pM to about 700 pM, about 80 pM to about 650 pM, about 80 pM to about 600 pM, about 80 pM to about 550 pM, about 80 pM to about 500 pM, about 80 pM to about 450 pM, about 80 pM to about 400 pM, about 80 pM to about 350 pM, about 80 pM to about 300 pM, about 80 pM to about 250 pM, about 80 pM to about 200 pM, about 80 pM to about 150 pM, about 80 pM to about 100 pM, about 80 pM to about 90 pM, about 90 pM to about 30 nM, about 90 pM to about 25 nM, about 90 pM to about 30 nM, about 90 pM to about 15 nM, about 90 pM to about 10 nM, about 90 pM to about 5 nM, about 90 pM to about 2 nM, about 90 pM to about 1 nM, about 90 pM to about 950 pM, about 90 pM to about 900 pM, about 90 pM to about 850 pM, about 90 pM to about 800 pM, about 90 pM to about 750 pM, about 90 pM to about 700 pM, about 90 pM to about 650 pM, about 90 pM to about 600 pM, about 90 pM to about 550 pM, about 90 pM to about 500 pM, about 90 pM to about 450 pM, about 90 pM to about 400 pM, about 90 pM to about 350 pM, about 90 pM to about 300 pM, about 90 pM to about 250 pM, about 90 pM to about 200 pM, about 90 pM to about 150 pM, about 90 pM to about 100 pM, about 100 pM to about 30 nM, about 100 pM to about 25 nM, about 100 pM to about 30 nM, about 100 pM to about 15 nM, about 100 pM to about 10 nM, about 100 pM to about 5 nM, about 100 pM to about 2 nM, about 100 pM to about 1 nM, about 100 pM to about 950 pM, about 100 pM to about 900 pM, about 100 pM to about 850 pM, about 100 pM to about 800 pM, about 100 pM to about 750 pM, about 100 pM to about 700 pM, about 100 pM to about 650 pM, about 100 pM to about 600 pM, about 100 pM to about 550 pM, about 100 pM to about 500 pM, about 100 pM to about 450 pM, about 100 pM to about 400 pM, about 100 pM to about 350 pM, about 100 pM to about 300 pM, about 100 pM to about 250 pM, about 100 pM to about 200 pM, about 100 pM to about 150 pM, about 150 pM to about 30 nM, about 150 pM to about 25 nM, about 150 pM to about 30 nM, about 150 pM to about 15 nM, about 150 pM to about 10 nM, about 150 pM to about 5 nM, about 150 pM to about 2 nM, about 150 pM to about 1 nM, about 150 pM to about 950 pM, about 150 pM to about 900 pM, about 150 pM to about 850 pM, about 150 pM to about 800 pM, about 150 pM to about 750 pM, about 150 pM to about 700 pM, about 150 pM to about 650 pM, about 150 pM to about 600 pM, about 150 pM to about 550 pM, about 150 pM to about 500 pM, about 150 pM to about 450 pM, about 150 pM to about 400 pM, about 150 pM to about 350 pM, about 150 pM to about 300 pM, about 150 pM to about 250 pM, about 150 pM to about 200 pM, about 200 pM to about 30 nM, about 200 pM to about 25 nM, about 200 pM to about 30 nM, about 200 pM to about 15 nM, about 200 pM to about 10 nM, about 200 pM to about 5 nM, about 200 pM to about 2 nM, about 200 pM to about 1 nM, about 200 pM to about 950 pM, about 200 pM to about 900 pM, about 200 pM to about 850 pM, about 200 pM to about 800 pM, about 200 pM to about 750 pM, about 200 pM to about 700 pM, about 200 pM to about 650 pM, about 200 pM to about 600 pM, about 200 pM to about 550 pM, about 200 pM to about 500 pM, about 200 pM to about 450 pM, about 200 pM to about 400 pM, about 200 pM to about 350 pM, about 200 pM to about 300 pM, about 200 pM to about 250 pM, about 300 pM to about 30 nM, about 300 pM to about 25 nM, about 300 pM to about 30 nM, about 300 pM to about 15 nM, about 300 pM to about 10 nM, about 300 pM to about 5 nM, about 300 pM to about 2 nM, about 300 pM to about 1 nM, about 300 pM to about 950 pM, about 300 pM to about 900 pM, about 300 pM to about 850 pM, about 300 pM to about 800 pM, about 300 pM to about 750 pM, about 300 pM to about 700 pM, about 300 pM to about 650 pM, about 300 pM to about 600 pM, about 300 pM to about 550 pM, about 300 pM to about 500 pM, about 300 pM to about 450 pM, about 300 pM to about 400 pM, about 300 pM to about 350 pM, about 400 pM to about 30 nM, about 400 pM to about 25 nM, about 400 pM to about 30 nM, about 400 pM to about 15 nM, about 400 pM to about 10 nM, about 400 pM to about 5 nM, about 400 pM to about 2 nM, about 400 pM to about 1 nM, about 400 pM to about 950 pM, about 400 pM to about 900 pM, about 400 pM to about 850 pM, about 400 pM to about 800 pM, about 400 pM to about 750 pM, about 400 pM to about 700 pM, about 400 pM to about 650 pM, about 400 pM to about 600 pM, about 400 pM to about 550 pM, about 400 pM to about 500 pM, about 500 pM to about 30 nM, about 500 pM to about 25 nM, about 500 pM to about 30 nM, about 500 pM to about 15 nM, about 500 pM to about 10 nM, about 500 pM to about 5 nM, about 500 pM to about 2 nM, about 500 pM to about 1 nM, about 500 pM to about 950 pM, about 500 pM to about 900 pM, about 500 pM to about 850 pM, about 500 pM to about 800 pM, about 500 pM to about 750 pM, about 500 pM to about 700 pM, about 500 pM to about 650 pM, about 500 pM to about 600 pM, about 500 pM to about 550 pM, about 600 pM to about 30 nM, about 600 pM to about 25 nM, about 600 pM to about 30 nM, about 600 pM to about 15 nM, about 600 pM to about 10 nM, about 600 pM to about 5 nM, about 600 pM to about 2 nM, about 600 pM to about 1 nM, about 600 pM to about 950 pM, about 600 pM to about 900 pM, about 600 pM to about 850 pM, about 600 pM to about 800 pM, about 600 pM to about 750 pM, about 600 pM to about 700 pM, about 600 pM to about 650 pM, about 700 pM to about 30 nM, about 700 pM to about 25 nM, about 700 pM to about 30 nM, about 700 pM to about 15 nM, about 700 pM to about 10 nM, about 700 pM to about 5 nM, about 700 pM to about 2 nM, about 700 pM to about 1 nM, about 700 pM to about 950 pM, about 700 pM to about 900 pM, about 700 pM to about 850 pM, about 700 pM to about 800 pM, about 700 pM to about 750 pM, about 800 pM to about 30 nM, about 800 pM to about 25 nM, about 800 pM to about 30 nM, about 800 pM to about 15 nM, about 800 pM to about 10 nM, about 800 pM to about 5 nM, about 800 pM to about 2 nM, about 800 pM to about 1 nM, about 800 pM to about 950 pM, about 800 pM to about 900 pM, about 800 pM to about 850 pM, about 900 pM to about 30 nM, about 900 pM to about 25 nM, about 900 pM to about 30 nM, about 900 pM to about 15 nM, about 900 pM to about 10 nM, about 900 pM to about 5 nM, about 900 pM to about 2 nM, about 900 pM to about 1 nM, about 900 pM to about 950 pM, about 1 nM to about 30 nM, about 1 nM to about 25 nM, about 1 nM to about 20 nM, about 1 nM to about 15 nM, about 1 nM to about 10 nM, about 1 nM to about 5 nM, about 2 nM to about 30 nM, about 2 nM to about 25 nM, about 2 nM to about 20 nM, about 2 nM to about 15 nM, about 2 nM to about 10 nM, about 2 nM to about 5 nM, about 4 nM to about 30 nM, about 4 nM to about 25 nM, about 4 nM to about 20 nM, about 4 nM to about 15 nM, about 4 nM to about 10 nM, about 4 nM to about 5 nM, about 5 nM to about 30 nM, about 5 nM to about 25 nM, about 5 nM to about 20 nM, about 5 nM to about 15 nM, about 5 nM to about 10 nM, about 10 nM to about 30 nM, about 10 nM to about 25 nM, about 10 nM to about 20 nM, about 10 nM to about 15 nM, about 15 nM to about 30 nM, about 15 nM to about 25 nM, about 15 nM to about 20 nM, about 20 nM to about 30 nM, and about 20 nM to about 25 nM).

[0501] Any of the target-binding domains described herein can bind to its target with a K_{D} of between about 1 nM to about 10 nM (e.g., about 1 nM to about 9 nM, about 1 nM to about 8 nM, about 1 nM to about 7 nM, about 1 nM to about 6 nM, about 1 nM to about 5 nM, about 1 nM to about 4 nM, about 1 nM to about 3 nM, about 1 nM to about 2 nM, about 2 nM to about 10 nM, about 2 nM to about 9 nM, about 2 nM to about 8 nM, about 2 nM to about 7 nM, about 2 nM to about 6 nM, about 2 nM to about 5 nM, about 2 nM to about 4 nM, about 2 nM to about 3 nM, about 3 nM to about 10 nM, about 3 nM to about 9 nM, about 3 nM to about 8 nM, about 3 nM to about 7 nM, about 3 nM to about 6 nM, about 3 nM to about 5 nM, about 3 nM to about 4 nM, about 4 nM to about 10 nM, about 4 nM to about 9 nM, about 4 nM to about 8 nM, about 4 nM to about 7 nM, about 4 nM to about 6 nM, about 4 nM to about 5 nM, about 5 nM to about 10 nM, about 5 nM to about 9 nM, about 5 nM to about 8 nM, about 5 nM to about 7 nM, about 5 nM to about 6 nM, about 6 nM to about 10 nM, about 6 nM to about 9 nM, about 6 nM to about 8 nM, about 6 nM to about 7 nM, about 7 nM to about 10 nM, about 7 nM to about 9 nM, about 7 nM to about 8 nM, about 8 nM to about 10 nM, about 8 nM to about 9 nM, and about 9 nM to about 10 nM).

[0502] A variety of different methods known in the art can be used to determine the K_{D} values of any of the antigen-binding protein constructs described herein (e.g., an electrophoretic mobility shift assay, a filter binding assay, surface plasmon resonance, and a biomolecular binding kinetics assay, etc.).

### Antigen-Binding Domains

[0503] In some embodiments of any of the single-chain or multi-chain chimeric polypeptides described herein, the first target-binding domain and the second target-binding domain bind specifically to the same antigen. In some embodiments of these single-chain or multi-chain chimeric polypeptides, the first target-binding domain and the second target-binding domain bind specifically to the same epitope. In some embodiments of these single-chain or multi-chain chimeric polypeptides, the first target-binding domain and the second target-binding domain include the same amino acid sequence.

[0504] In some embodiments of any of the single-chain or multi-chain chimeric polypeptides described herein, the first target-binding domain and the second target-binding domain bind specifically to different antigens.

[0505] In some embodiments of any of the single-chain or multi-chain chimeric polypeptides described herein, one or both of the first target-binding domain and the second target-binding domain is an antigen-binding domain. In some embodiments of any of the single-chain or multi-chain chimeric polypeptides described herein, the first target-binding domain and the second target-binding domain are each antigen-binding domains. In some embodiments of any of the single-chain or multi-chain chimeric polypeptides described herein, the antigen-binding domain includes or is a scFv or a single domain antibody (e.g., a V_{aH}H or a V_{NAR} domain).

[0506] In some examples, an antigen-binding domain (e.g., any of the antigen-binding domains described herein) can bind specifically to any one of CD16a (see, e.g., those described in U.S. Pat. No. 9,035,026), CD28 (see, e.g., those described in U.S. Pat. No. 7,723,482), CD3 (see, e.g., those described in U.S. Pat. No. 9,226,962), CD33 (see, e.g., those described in U.S. Pat. No. 8,759,494), CD20 (see, e.g., those described in WO 2014/026054), CD19 (see, e.g., those described in U.S. Pat. No. 9,701,758), CD22 (see, e.g., those described in WO 2003/104425), CD123 (see, e.g., those described in WO 2014/130635), IL-1R (see, e.g., those described in U.S. Pat. No. 8,741,604), IL-1 (see, e.g., those described in WO 2014/095808), VEGF (see, e.g., those described in U.S. Pat. No. 9,090,684), IL-6R (see, e.g., those described in U.S. Pat. No. 7,482,436), IL-4 (see, e.g., those described in U.S. Patent Application Publication No. 2012/0171197), IL-10 (see, e.g., those described in U.S. Patent Application Publication No. 2016/0340413), PDL-1 (see, e.g., those described in Drees et al., Protein Express. Purif. 94:60-66, 2014), TIGIT (see, e.g., those described in U.S. Patent Application Publication No. 2017/0198042), PD-1 (see, e.g., those described in U.S. Pat. No. 7,488,802), TIM3 (see, e.g., those described in U.S. Pat. No. 8,552,156), CTLA4 (see, e.g., those described in WO 2012/120125), MICA (see, e.g., those described in WO 2016/154585), MICB (see, e.g., those described in U.S. Pat. No. 8,753,640), IL-6 (see, e.g., those described in Gejima et al., Human Antibodies 11(4):121-129, 2002), IL-8 (see, e.g., those described in U.S. Pat. No. 6,117,980), TNFα (see, e.g., those described in Geng et al., Immunol. Res. 62(3):377-385, 2015), CD26 (see, e.g., those described in WO 2017/189526), CD36 (see, e.g., those described in U.S. Patent Application Publication No. 2015/0259429), ULBP2 (see, e.g., those described in U.S. Pat. No. 9,273,136), CD30 (see, e.g., those described in Homach et al., Scand. J. Immunol. 48(5):497-501, 1998), CD200 (see, e.g., those described in U.S. Pat. No. 9,085,623), IGF-1R (see, e.g., those described in U.S. Patent Application Publication No. 2017/0051063), MUC4AC (see, e.g., those described in WO 2012/170470), MUC5AC (see, e.g., those described in U.S. Pat. No. 9,238,084), Trop-2 (see, e.g., those described in WO 2013/068946), CMET (see, e.g., those described in Edwardraja et al., Biotechnol. Bioeng. 106(3):367-375, 2010), EGFR (see, e.g., those described in Akbari et al., Protein Expr. Purif. 127:8-15, 2016), HER1 (see, e.g., those described in U.S. Patent Application Publication No. 2013/0274446), HER2 (see, e.g., those described in Cao et al., Biotechnol. Lett. 37(7):1347-1354, 2015), HER3 (see, e.g., those described in U.S. Pat. No. 9,505,843), PSMA (see, e.g., those described in Parker et al., Protein Expr. Purif. 89(2):136-145, 2013), CEA (see, e.g., those described in WO 1995/015341), B7H3 (see, e.g., those described in U.S. Pat. No. 9,371,395), EPCAM (see, e.g., those described in WO 2014/159531), BCMA (see, e.g., those described in Smith et al., Mol. Ther. 26(6):1447-1456, 2018), P-cadherin (see, e.g., those described in U.S. Pat. No. 7,452,537), CEACAM5 (see, e.g., those described in U.S. Pat. No. 9,617,345), a UL16-binding protein (see, e.g., those described in WO 2017/083612), HLA-DR (see, e.g., Pistillo et al., Exp. Clin. Immunogenet. 14(2):123-130, 1997), DLL4 (see, e.g., those described in WO 2014/007513), TYRO3 (see, e.g., those described in WO 2016/166348), AXL (see, e.g., those described in WO 2012/175692), MER (see, e.g., those described in WO 2016/106221), CD122 (see, e.g., those described in U.S. Patent Application Publication No. 2016/0367664), CD155 (see, e.g., those described in WO 2017/149538), or PDGF-DD (see, e.g., those described in U.S. Pat. No. 9,441,034).

[0507] The antigen-binding domains present in any of the single-chain or multi-chain chimeric polypeptides described herein are each independently selected from the group consisting of: a VHH domain, a VNAR domain, and a scFv. In some embodiments, any of the antigen-binding domains described herein is a BiTe, a (scFv)₂, a nanobody, a nanobody-HSA, a DART, a TandAb, a scDiabody, a scDiabody-CH3, scFv-CH-CL-scFv, a HSAbody, scDiabody-HAS, or a tandem-scFv. Additional examples of antigen-binding domains that can be used in any of the single-chain or multi-chain chimeric polypeptide are known in the art.

[0508] A VHH domain is a single monomeric variable antibody domain that can be found in camelids. A VNAR domain is a single monomeric variable antibody domain that can be found in cartilaginous fish. Non-limiting aspects of VHH domains and VNAR domains are described in, e.g., Cromie et al., Curr. Top. Med. Chem. 15:2543-2557, 2016; De Genst et al., Dev. Comp. Immunol. 30:187-198, 2006; De Meyer et al., Trends Biotechnol. 32:263-270, 2014; Kijanka et al., Nanomedicine 10:161-174, 2015; Kovaleva et al., Expert. Opin. Biol. Ther. 14:1527-1539, 2014; Krah et al., Immunopharmacol. Immunotoxicol. 38:21-28, 2016; Mujic-Delic et al., Trends Pharmacol. Sci. 35:247-255, 2014; Muyldermans, J. Biotechnol. 74:277-302, 2001; Muyldermans et al., Trends Biochem. Sci. 26:230-235, 2001; Muyldermans, Ann. Rev. Biochem. 82:775-797, 2013; Rahbarizadeh et al., Immunol. Invest. 40:299-338, 2011; Van Audenhove et al., EBioMedicine 8:40-48, 2016; Van Bockstaele et al., Curr. Opin. Investig. Drugs 10:1212-1224, 2009; Vincke et al., Methods Mol. Biol. 911:15-26, 2012; and Wesolowski et al., Med. Microbiol. Immunol. 198:157-174, 2009.

[0509] In some embodiments, each of the antigen-binding domains in the single-chain or multi-chain chimeric polypeptides described herein are both VHH domains, or at least one antigen-binding domain is a VHH domain. In some embodiments, each of the antigen-binding domains in the single-chain or multi-chain chimeric polypeptides described herein are both VNAR domains, or at least one antigen-binding domain is a VNAR domain. In some embodiments, each of the antigen-binding domains in the single-chain or multi-chain chimeric polypeptides described herein are both scFv domains, or at least one antigen-binding domain is a scFv domain.

[0510] In some embodiments, two or more of polypeptides present in the single-chain or multi-chain chimeric polypeptide can assemble (e.g., non-covalently assemble) to form any of the antigen-binding domains described herein, e.g., an antigen-binding fragment of an antibody (e.g., any of the antigen-binding fragments of an antibody described herein), a VHH-scAb, a VHH-Fab, a Dual scFab, a F(ab′)2, a diabody, a crossMab, a DAF (two-in-one), a DAF (four-in-one), a DutaMab, a DT-IgG, a knobs-in-holes common light chain, a knobs-in-holes assembly, a charge pair, a Fab-arm exchange, a SEEDbody, a LUZ-Y, a Fcab, a κλ-body, an orthogonal Fab, a DVD-IgG, a IgG(H)-scFv, a scFv-(H)IgG, IgG(L)-scFv, scFv-(L)IgG, IgG(L,H)-Fv, IgG(H)-V, V(H)—IgG, IgG(L)-V, V(L)-IgG, KIH IgG-scFab, 2scFv-IgG, IgG-2scFv, scFv4-Ig, Zybody, DVI-IgG, Diabody-CH3, a triple body, a miniantibody, a minibody, a TriBi minibody, scFv-CH3 KIH, Fab-scFv, a F(ab′)2-scFv2, a scFv-KIH, a Fab-scFv-Fc, a tetravalent HCAb, a scDiabody-Fc, a Diabody-Fc, a tandem scFv-Fc, an Intrabody, a dock and lock, a 1mmTAC, an IgG-IgG conjugate, a Cov-X-Body, and a scFv1-PEG-scFv2. See, e.g., Spiess et al., Mol. Immunol. 67:95-106, 2015, incorporated in its entirety herewith, for a description of these elements. Non-limiting examples of an antigen-binding fragment of an antibody include an Fv fragment, a Fab fragment, a F(ab′)2 fragment, and a Fab′ fragment. Additional examples of an antigen-binding fragment of an antibody is an antigen-binding fragment of an IgG (e.g., an antigen-binding fragment of IgG1, IgG2, IgG3, or IgG4) (e.g., an antigen-binding fragment of a human or humanized IgG e.g., human or humanized IgG1, IgG2, IgG3, or IgG4); an antigen-binding fragment of an IgA (e.g., an antigen-binding fragment of IgA1 or IgA2) (e.g., an antigen-binding fragment of a human or humanized IgA, e.g., a human or humanized IgA1 or IgA2); an antigen-binding fragment of an IgD (e.g., an antigen-binding fragment of a human or humanized IgD); an antigen-binding fragment of an IgE (e.g., an antigen-binding fragment of a human or humanized IgE); or an antigen-binding fragment of an IgM (e.g., an antigen-binding fragment of a human or humanized IgM).

[0511] An “Fv” fragment includes a non-covalently-linked dimer of one heavy chain variable domain and one light chain variable domain.

[0512] A “Fab” fragment includes, the constant domain of the light chain and the first constant domain (CHO of the heavy chain, in addition to the heavy and light chain variable domains of the Fv fragment.

[0513] A “F(ab′)₂” fragment includes two Fab fragments joined, near the hinge region, by disulfide bonds.

[0514] A “dual variable domain immunoglobulin” or “DVD-Ig” refers to multivalent and multispecific binding proteins as described, e.g., in DiGiammarino et al., Methods Mol. Biol. 899:145-156, 2012; Jakob et al., MABs 5:358-363, 2013; and U.S. Pat. Nos. 7,612,181; 8,258,268; 8,586,714; 8,716,450; 8,722,855; 8,735,546; and 8,822,645, each of which is incorporated by reference in its entirety.

[0515] DARTs are described in, e.g., Garber, Nature Reviews Drug Discovery 13:799-801, 2014.

[0516] In some embodiments of any of the antigen-binding domains described herein can bind to an antigen selected from the group consisting of: a protein, a carbohydrate, a lipid, and a combination thereof.

[0517] Additional examples and aspects of antigen-binding domains are known in the art.

### Soluble Interleukin or Cytokine Protein

[0518] In some embodiments of any of the single-chain or multi-chain chimeric polypeptides described herein, one or both of the first target-binding domain and the second target-binding domain can be a soluble interleukin protein or soluble cytokine protein. In some embodiments, the soluble interleukin or soluble cytokine protein is selected from the group of: IL-2, IL-3, IL-7, IL-8, IL-10, IL-12, IL-15, IL-17, IL-18, IL-21, PDGF-DD, and SCF. Non-limiting examples of soluble IL-2, IL-3, IL-7, IL-8, IL-10, IL-15, IL-17, IL-18, IL-21, PDGF-DD, and SCF are provided below.

Human Soluble IL-3
(SEQ ID NO: 105)
apmtqttplkt swvncsnmid eiithlkqpp lplldfnnln
gedqdilmen nlrrpnleaf nravkslqna saiesilknl
lpclplataa ptrhpihikd gdwnefrrkl tfylktlena
qaqqttlsla if
Human Soluble IL-8
(SEQ ID NO: 106)
egavlprsak elrcqcikty skpfhpkfik elrviesgph
canteiivkl sdgrelcldp kenwvqrvve kflkraens
Human Soluble IL-10
(SEQ ID NO: 107)
spgqgtqsensc thfpgnlpnm lrdlrdafsr vktffqmkdq
ldnlllkesl ledfkgylgc qalsemiqfy leevmpqaen
qdpdikahvn slgenlktlr lrlrrchrfl pcenkskave
qvknafnklq ekgiykamse fdifinyiea ymtmkirn
Human Soluble IL-17
(SEQ ID NO: 108)
gitiprn pgcpnsedkn fprtvmvnln ihnrntntnp
krssdyynrs tspwnlhrne dperypsviw eakcrhlgci
nadgnvdyhm nsvpiqqeil vlrrepphcp nsfrlekilv
svgctcvtpi vhhva
Human Soluble IL-18
(SEQ ID NO: 109)
yfgklesklsvirn lndqvlfidq gnrplfedmt dsdcrdnapr
tifiismykd sqprgmavti svkcekistl scenkiisfk
emnppdnikd tksdiiffqr svpghdnkmq fesssyegyf
lacekerdlf klilkkedel gdrsimftvq ned
Human Soluble PDGF-DD
(SEQ ID NO: 110)
rdtsatpqsasi kalrnanlrr desnhltdly rrdetiqvkg
ngyvqsprfp nsyprnlllt wrlhsqentr iqlvfdnqfg
leeaendicr ydfvevedis etstiirgrw cghkevppri
ksrtnqikit fksddyfvak pgfkiyysll edfqpaaase
tnwesvtssi sgvsynspsv tdptliadal dkkiaefdtv
edllkyfnpe swqedlenmy ldtpryrgrs yhdrkskvdl
drlnddakry sctprnysvn ireelklanv vffprcllvq
rcggncgcgt vnwrsctcns gktvkkyhev lqfepghikr
rgraktmalv diqldhherc dcicssrppr
Human Soluble SCF
(SEQ ID NO: 111)
egicrnrvtnnvkdv tklvanlpkd ymitlkyvpg mdvlpshcwi
semvvqlsds ltdlldkfsn iseglsnysi idklvnivdd
lvecvkenss kdlkksfksp eprlftpeef frifnrsida
fkdfvvaset sdcvvsstls pekdsrvsvt kpfmlppvaa
sslrndssss nrkaknppgd sslhwaamal palfsliigf
afgalywkkr qpsltraven iqineednei smlqekeref
qev
Human Soluble FLT3L
(SEQ ID NO: 112)
tqdcsfqhspissd favkirelsd yllqdypvtv asnlqdeelc
gglwrlvlaq rwmerlktva gskmqgller vnteihfvtk
cafqpppscl rfvqtnisrl lqetseqlva lkpwitrqnf
srclelqcqp dsstlpppws prpleatapt apqpplllll
llpvglllla aawclhwqrt rrrtprpgeq vppvpspqdl
llveh

[0519] Additional examples of soluble interleukin proteins and soluble cytokine proteins are known in the art.

### Soluble Receptor

[0520] In some embodiments of any of the single-chain or multi-chain chimeric polypeptides described herein, one or both of the first target-binding domain and the second target-binding domain is a soluble interleukin receptor or a soluble cytokine receptor. In some embodiments, the soluble receptor is a soluble TGF-β receptor II (TGF-β RII) (see, e.g., those described in Yung et al., Am. J. Resp. Crit. Care Med. 194(9):1140-1151, 2016), a soluble TGF-βRIII (see, e.g., those described in Heng et al., Placenta 57:320, 2017), a soluble NKG2D (see, e.g., Cosman et al., Immunity 14(2):123-133, 2001; Costa et al., Front. Immunol., Vol. 9, Article 1150, May 29, 2018; doi: 10.3389/fimmu.2018.01150), a soluble NKp30 (see, e.g., Costa et al., Front. Immunol., Vol. 9, Article 1150, May 29, 2018; doi: 10.3389/fimmu.2018.01150), a soluble NKp44 (see, e.g., those described in Costa et al., Front. Immunol., Vol. 9, Article 1150, May 29, 2018; doi: 10.3389/fimmu.2018.01150), a soluble NKp46 (see, e.g., Mandelboim et al., Nature 409:1055-1060, 2001; Costa et al., Front. Immunol., Vol. 9, Article 1150, May 29, 2018; doi: 10.3389/fimmu.2018.01150), a soluble DNAM1 (see, e.g., those described in Costa et al., Front. Immunol., Vol. 9, Article 1150, May 29, 2018; doi: 10.3389/fimmu.2018.01150), a scMHCI (see, e.g., those described in Washburn et al., PLoS One 6(3):e18439, 2011), a scMHCII (see, e.g., those described in Bishwajit et al., Cellular Immunol. 170(1):25-33, 1996), a scTCR (see, e.g., those described in Weber et al., Nature 356(6372):793-796, 1992), a soluble CD155 (see, e.g., those described in Tahara-Hanaoka et al., Int. Immunol. 16(4):533-538, 2004), or a soluble CD28 (see, e.g., Hebbar et al., Clin. Exp. Immunol. 136:388-392, 2004).

[0521] Additional examples of soluble interleukin receptors and soluble cytokine receptors are known in the art.

### Pairs of Affinity Domains

[0522] In some embodiments, a multi-chain chimeric polypeptide includes: 1) a first chimeric polypeptide that includes a first domain of a pair of affinity domains, and 2) a second chimeric polypeptide that includes a second domain of a pair of affinity domains such that the first chimeric polypeptide and the second chimeric polypeptide associate through the binding of the first domain and the second domain of the pair of affinity domains. In some embodiments, the pair of affinity domains is a sushi domain from an alpha chain of human IL-15 receptor (IL-15Rα) and a soluble IL-15. A sushi domain, also known as a short consensus repeat or type 1 glycoprotein motif, is a common motif in protein-protein interaction. Sushi domains have been identified on a number of protein-binding molecules, including complement components C1r, C1s, factor H, and C2m, as well as the nonimmunologic molecules factor XIII and β2-glycoprotein. A typical Sushi domain has approximately 60 amino acid residues and contains four cysteines (Ranganathan, Pac. Symp Biocomput. 2000:155-67). The first cysteine can form a disulfide bond with the third cysteine, and the second cysteine can form a disulfide bridge with the fourth cysteine. In some embodiments in which one member of the pair of affinity domains is a soluble IL-15, the soluble IL-15 has a D8N or D8A amino acid substitution. In some embodiments in which one member of the pair of affinity domains is an alpha chain of human IL-15 receptor (IL-15Rα), the human IL-15Rα is a mature full-length IL-15Rα. In some embodiments, the pair of affinity domains is barnase and barnstar. In some embodiments, the pair of affinity domains is a PKA and an AKAP. In some embodiments, the pair of affinity domains is an adapter/docking tag module based on mutated RNase I fragments (Rossi, Proc Natl Acad Sci USA. 103:6841-6846, 2006; Sharkey et al., Cancer Res. 68:5282-5290, 2008; Rossi et al., Trends Pharmacol Sci. 33:474-481, 2012) or SNARE modules based on interactions of the proteins syntaxin, synaptotagmin, synaptobrevin, and SNAP25 (Deyev et al., Nat Biotechnol. 1486-1492, 2003).

[0523] In some embodiments, a first chimeric polypeptide of a multi-chain chimeric polypeptide includes a first domain of a pair of affinity domains and a second chimeric polypeptide of the multi-chain chimeric polypeptide includes a second domain of a pair of affinity domains, wherein the first domain of the pair of affinity domains and the second domain of the pair of affinity domains bind to each other with a dissociation equilibrium constant (K_{D}) of less than 1×10⁻⁷ M, less than 1×10⁻⁸M, less than 1×10⁻⁹ M, less than 1×10⁻¹⁰ M, less than 1×10⁻¹¹ M, less than 1×10⁻¹²M, or less than 1×10⁻¹³ M. In some embodiments, the first domain of the pair of affinity domains and the second domain of the pair of affinity domains bind to each other with a K_{D} of about 1×10⁻⁴ M to about 1×10⁻⁶ M, about 1×10⁻⁵M to about 1×10⁻⁷ M, about 1×10⁻⁶ M to about 1×10⁻⁸ M, about 1×10⁻⁷ M to about 1×10⁻⁹M, about 1×10⁻⁸M to about 1×10⁻¹⁰ M, about 1×10⁻⁹M to about 1×10⁻¹¹M, about 1×10⁻¹⁰ M to about 1×10⁻¹²M, about 1×10⁻¹¹M to about 1×10⁻¹³M, about 1×10⁻⁴ M to about 1×10⁻⁵M, about 1×10⁻⁵M to about 1×10⁻⁶ M, about 1×10⁻⁶ M to about 1×10⁻⁷ M, about 1×10⁻⁷ M to about 1×10⁻⁸M, about 1×10⁻⁸M to about 1×10⁻⁹M, about 1×10⁻⁹M to about 1×10⁻¹⁰ M, about 1×10⁻¹⁰ M to about 1×10⁻¹¹ about 1×10⁻¹¹M to about 1×10⁻¹²M, or about 1×10⁻¹²M to about 1×10⁻¹³ M (inclusive). Any of a variety of different methods known in the art can be used to determine the K_{D} value of the binding of the first domain of the pair of affinity domains and the second domain of the pair of affinity domains (e.g., an electrophoretic mobility shift assay, a filter binding assay, surface plasmon resonance, and a biomolecular binding kinetics assay, etc.).

[0524] In some embodiments, a first chimeric polypeptide of a multi-chain chimeric polypeptide includes a first domain of a pair of affinity domains and a second chimeric polypeptide of the multi-chain chimeric polypeptide includes a second domain of a pair of affinity domains, wherein the first domain of the pair of affinity domains, the second domain of the pair of affinity domains, or both is about 10 to 100 amino acids in length. For example, a first domain of a pair of affinity domains, a second domain of a pair of affinity domains, or both can be about 10 to 100 amino acids in length, about 15 to 100 amino acids in length, about 20 to 100 amino acids in length, about 25 to 100 amino acids in length, about 30 to 100 amino acids in length, about 35 to 100 amino acids in length, about 40 to 100 amino acids in length, about 45 to 100 amino acids in length, about 50 to 100 amino acids in length, about 55 to 100 amino acids in length, about 60 to 100 amino acids in length, about 65 to 100 amino acids in length, about 70 to 100 amino acids in length, about 75 to 100 amino acids in length, about 80 to 100 amino acids in length, about 85 to 100 amino acids in length, about 90 to 100 amino acids in length, about 95 to 100 amino acids in length, about 10 to 95 amino acids in length, about 10 to 90 amino acids in length, about 10 to 85 amino acids in length, about 10 to 80 amino acids in length, about 10 to 75 amino acids in length, about 10 to 70 amino acids in length, about 10 to 65 amino acids in length, about 10 to 60 amino acids in length, about 10 to 55 amino acids in length, about 10 to 50 amino acids in length, about 10 to 45 amino acids in length, about 10 to 40 amino acids in length, about 10 to 35 amino acids in length, about 10 to 30 amino acids in length, about 10 to 25 amino acids in length, about 10 to 20 amino acids in length, about 10 to 15 amino acids in length, about 20 to 30 amino acids in length, about 30 to 40 amino acids in length, about 40 to 50 amino acids in length, about 50 to 60 amino acids in length, about 60 to 70 amino acids in length, about 70 to 80 amino acids in length, about 80 to 90 amino acids in length, about 90 to 100 amino acids in length, about 20 to 90 amino acids in length, about 30 to 80 amino acids in length, about 40 to 70 amino acids in length, about 50 to 60 amino acids in length, or any range in between. In some embodiments, a first domain of a pair of affinity domains, a second domain of a pair of affinity domains, or both is about 10, 15, 20, 25, 30, 35, 40, 45, 50, 55, 60, 65, 70, 75, 80, 85, 90, 95, or 100 amino acids in length.

[0525] In some embodiments, any of the first and/or second domains of a pair of affinity domains disclosed herein can include one or more additional amino acids (e.g., 1, 2, 3, 5, 6, 7, 8, 9, 10, or more amino acids) at its N-terminus and/or C-terminus, so long as the function of the first and/or second domains of a pair of affinity domains remains intact. For example, a sushi domain from an alpha chain of human IL-15 receptor (IL-15Rα) can include one or more additional amino acids at the N-terminus and/or the C-terminus, while still retaining the ability to bind to a soluble IL-15. Additionally or alternatively, a soluble IL-15 can include one or more additional amino acids at the N-terminus and/or the C-terminus, while still retaining the ability to bind to a sushi domain from an alpha chain of human IL-15 receptor (IL-15Rα).

[0526] A non-limiting example of a sushi domain from an alpha chain of IL-15 receptor alpha (IL-15Rα) can include a sequence that is at least 70% identical, at least 75% identical, at least 80% identical, at least 85% identical, at least 90% identical, at least 95% identical, at least 99% identical, or 100% identical to ITCPPPMSVEHADIWVKSYSLYSRERYICNSGFKRKAGTSSLTECVLNKATNVAH WTTPSLKCIR (SEQ ID NO: 113). In some embodiments, a sushi domain from an alpha chain of IL-15Rα can be encoded by a nucleic acid including

(SEQ ID NO: 114)
ATTACATGCCCCCCTCCCATGAGCGTGGAGCACGCCGACATCTGGGTGAA
GAGCTATAGCCTCTACAGCCGGGAGAGGTATATCTGTAACAGCGGCTTCA
AGAGGAAGGCCGGCACCAGCAGCCTCACCGAGTGCGTGCTGAATAAGGCT
ACCAACGTGGCTCACTGGACAACACCCTCTTTAAAGTGCATCCGG.

[0527] In some embodiments, a soluble IL-15 can include a sequence that is at least 70% identical, at least 75% identical, at least 80% identical, at least 85% identical, at least 90% identical, at least 95% identical, at least 99% identical, or 100% identical to NWVNVISDLKKIEDLIQSMHIDATLYTESDVHPSCKVTAMKCFLLELQVISLESGD ASIHDTVENLIILANNSLSSNGNVTESGCKECEELEEKNIKEFLQSFVHIVQMFINT S (SEQ ID NO: 115). In some embodiments, a soluble IL-15 can be encoded by a nucleic acid including the sequence of

(SEQ ID NO: 116)
AACTGGGTGAACGTCATCAGCGATTTAAAGAAGATCGAAGATTTAATTCA
GTCCATGCATATCGACGCCACTTTATACACAGAATCCGACGTGCACCCCT
CTTGTAAGGTGACCGCCATGAAATGTTTTTTACTGGAGCTGCAAGTTATC
TCTTTAGAGAGCGGAGACGCTAGCATCCACGACACCGTGGAGAATTTAAT
CATTTTAGCCAATAACTCTTTATCCAGCAACGGCAACGTGACAGAGTCCG
GCTGCAAGGAGTGCGAAGAGCTGGAGGAGAAGAACATCAAGGAGTTTCTG
CAATCCTTTGTGCACATTGTCCAGATGTTCATCAATACCTCC.

### Signal Sequence

[0528] In some embodiments, a single-chain chimeric polypeptide comprises a signal sequence at its N-terminal end. In some embodiments, a multi-chain chimeric polypeptide includes a first chimeric polypeptide that includes a signal sequence at its N-terminal end. In some embodiments, a multi-chain chimeric polypeptide includes a second chimeric polypeptide that includes a signal sequence at its N-terminal end. In some embodiments, both the first chimeric polypeptide of a multi-chain chimeric polypeptide and a second chimeric polypeptide of the multi-chain chimeric polypeptide include a signal sequence. As will be understood by those of ordinary skill in the art, a signal sequence is an amino acid sequence that is present at the N-terminus of a number of endogenously produced proteins that directs the protein to the secretory pathway (e.g., the protein is directed to reside in certain intracellular organelles, to reside in the cell membrane, or to be secreted from the cell). Signal sequences are heterogeneous and differ greatly in their primary amino acid sequences. However, signal sequences are typically 16 to 30 amino acids in length and include a hydrophilic, usually positively charged N-terminal region, a central hydrophobic domain, and a C-terminal region that contains the cleavage site for signal peptidase.

[0529] In some embodiments, a first chimeric polypeptide of a multi-chain chimeric polypeptide, a second chimeric polypeptide of the multi-chain chimeric polypeptide, or both, or a single-chain chimeric polypeptide, includes a signal sequence having an amino acid sequence MKWVTFISLLFLFSSAYS (SEQ ID NO: 117). In some embodiments, a first chimeric polypeptide of a multi-chain chimeric polypeptide, a second chimeric polypeptide of the multi-chain chimeric polypeptide, or both, or a single-chain chimeric polypeptide, includes a signal sequence encoded by the nucleic acid sequence

(SEQ ID NO: 118)
ATGAAATGGGTGACCTTTATTTCTTTACTGTTCCTCTTTAGCAGCGCCTA
CTCC,
(SEQ ID NO: 119)
ATGAAGTGGGTCACATTTATCTCTTTACTGTTCCTCTTCTCCAGCGCCTA
CAGC,
or
(SEQ ID NO: 120)
ATGAAATGGGTGACCTTTATTTCTTTACTGTTCCTCTTTAGCAGCGCCTA
CTCC.

[0530] In some embodiments, a first chimeric polypeptide of a multi-chain chimeric polypeptide, a second chimeric polypeptide of the multi-chain chimeric polypeptide, or both, or a single-chain chimeric polypeptide, includes a signal sequence having an amino acid sequence MKCLLYLAFLFLGVNC (SEQ ID NO: 121). In some embodiments, a first chimeric polypeptide of a multi-chain chimeric polypeptide, a second chimeric polypeptide of the multi-chain chimeric polypeptide, or both, or a single-chain chimeric polypeptide, includes a signal sequence having an amino acid sequence MGQIVTMFEALPHIIDEVINIVIIVLIIITSIKAVYNFATCGILALVSFLFLAGRSCG (SEQ ID NO: 122). In some embodiments, a first chimeric polypeptide of a multi-chain chimeric polypeptide, a second chimeric polypeptide of the multi-chain chimeric polypeptide, or both, or a single-chain chimeric polypeptide, includes a signal sequence having an amino acid sequence: MPNHQSGSPTGSSDLLLSGKKQRPHLALRRKRRREMRKINRKVRRMNLAPIKEK TAWQHLQALISEAEEVLKTSQTPQNSLTLFLALLSVLGPPVTG (SEQ ID NO: 123). In some embodiments, a first chimeric polypeptide of a multi-chain chimeric polypeptide, a second chimeric polypeptide of the multi-chain chimeric polypeptide, or both, or a single-chain chimeric polypeptide, includes a signal sequence having an amino acid sequence MDSKGSSQKGSRLLLLLVVSNLLLCQGVVS (SEQ ID NO: 124). Those of ordinary skill in the art will be aware of other appropriate signal sequences for use in a first chimeric polypeptide and/or a second chimeric polypeptide of multi-chain chimeric polypeptides, or single-chain chimeric polypeptides described herein.

[0531] In some embodiments, a first chimeric polypeptide of a multi-chain chimeric polypeptide, a second chimeric polypeptide of the multi-chain chimeric polypeptide, or both, or a single-chain chimeric polypeptide, includes a signal sequence that is about 10 to 100 amino acids in length. For example, a signal sequence can be about 10 to 100 amino acids in length, about 15 to 100 amino acids in length, about 20 to 100 amino acids in length, about 25 to 100 amino acids in length, about 30 to 100 amino acids in length, about 35 to 100 amino acids in length, about 40 to 100 amino acids in length, about 45 to 100 amino acids in length, about 50 to 100 amino acids in length, about 55 to 100 amino acids in length, about 60 to 100 amino acids in length, about 65 to 100 amino acids in length, about 70 to 100 amino acids in length, about 75 to 100 amino acids in length, about 80 to 100 amino acids in length, about 85 to 100 amino acids in length, about 90 to 100 amino acids in length, about 95 to 100 amino acids in length, about 10 to 95 amino acids in length, about 10 to 90 amino acids in length, about 10 to 85 amino acids in length, about 10 to 80 amino acids in length, about 10 to 75 amino acids in length, about 10 to 70 amino acids in length, about 10 to 65 amino acids in length, about 10 to 60 amino acids in length, about 10 to 55 amino acids in length, about 10 to 50 amino acids in length, about 10 to 45 amino acids in length, about 10 to 40 amino acids in length, about 10 to 35 amino acids in length, about 10 to 30 amino acids in length, about 10 to 25 amino acids in length, about 10 to 20 amino acids in length, about 10 to 15 amino acids in length, about 20 to 30 amino acids in length, about 30 to 40 amino acids in length, about 40 to 50 amino acids in length, about 50 to 60 amino acids in length, about 60 to 70 amino acids in length, about 70 to 80 amino acids in length, about 80 to 90 amino acids in length, about 90 to 100 amino acids in length, about 20 to 90 amino acids in length, about 30 to 80 amino acids in length, about 40 to 70 amino acids in length, about 50 to 60 amino acids in length, or any range in between. In some embodiments, a signal sequence is about 10, 15, 20, 25, 30, 35, 40, 45, 50, 55, 60, 65, 70, 75, 80, 85, 90, 95, or 100 amino acids in length.

[0532] In some embodiments, any of the signal sequences disclosed herein can include one or more additional amino acids (e.g., 1, 2, 3, 5, 6, 7, 8, 9, 10, or more amino acids) at its N-terminus and/or C-terminus, so long as the function of the signal sequence remains intact. For example, a signal sequence having the amino acid sequence MKCLLYLAFLFLGVNC (SEQ ID NO: 125) can include one or more additional amino acids at the N-terminus or C-terminus, while still retaining the ability to direct the a first chimeric polypeptide of a multi-chain chimeric polypeptide, a second chimeric polypeptide of the multi-chain chimeric polypeptide, or both, or a single-chain chimeric polypeptide, to the secretory pathway.

[0533] In some embodiments, a first chimeric polypeptide of a multi-chain chimeric polypeptide, a second chimeric polypeptide of the multi-chain chimeric polypeptide, or both, or a single-chain chimeric polypeptide, includes a signal sequence that directs the multi-chain chimeric polypeptide into the extracellular space. Such embodiments are useful in producing single-chain or multi-chain chimeric polypeptides that are relatively easy to be isolated and/or purified.

### Peptide Tags

[0534] In some embodiments, a single-chain chimeric polypeptide includes a peptide tag (e.g., at the N-terminal end or the C-terminal end of the chimeric polypeptide). In some embodiments, a multi-chain chimeric polypeptide includes a first chimeric polypeptide that includes a peptide tag (e.g., at the N-terminal end or the C-terminal end of the first chimeric polypeptide). In some embodiments, a multi-chain chimeric polypeptide includes a second chimeric polypeptide that includes a peptide tag (e.g., at the N-terminal end or the C-terminal end of the second chimeric polypeptide). In some embodiments, both the first chimeric polypeptide of a multi-chain chimeric polypeptide and a second chimeric polypeptide of the multi-chain chimeric polypeptide include a peptide tag. In some embodiments, a first chimeric polypeptide of a multi-chain chimeric polypeptide, a second chimeric polypeptide of the multi-chain chimeric polypeptide, or both, or a single-chain chimeric polypeptide, includes two or more peptide tags.

[0535] Exemplary peptide tags that can be included in a first chimeric polypeptide of a multi-chain chimeric polypeptide, a second chimeric polypeptide of the multi-chain chimeric polypeptide, or both, or a single-chain chimeric polypeptide include, without limitation, AviTag (GLNDIFEAQKIEWHE; SEQ ID NO: 126), a calmodulin-tag (KRRWKKNFIAVSAANRFKKISSSGAL; SEQ ID NO: 127), a polyglutamate tag (EEEEEE; SEQ ID NO: 128), an E-tag (GAPVPYPDPLEPR; SEQ ID NO: 129), a FLAG-tag (DYKDDDDK; SEQ ID NO: 130), an HA-tag, a peptide from hemagglutinin (YPYDVPDYA; SEQ ID NO: 131), a his-tag (HEIHHH (SEQ ID NO: 132); HHHHHH (SEQ ID NO: 133); HHHHHHH (SEQ ID NO: 134); HHHHHHHH (SEQ ID NO: 135); HHHHHHHHH (SEQ ID NO: 136); or HHHHHHHHHH (SEQ ID NO: 137)), a myc-tag (EQKLISEEDL; SEQ ID NO: 138), NE-tag (TKENPRSNQEESYDDNES; SEQ ID NO: 139), S-tag, (KETAAAKFERQHMDS; SEQ ID NO: 140), SBP-tag (MDEKTTGWRGGHVVEGLAGELEQLRARLEHHPQGQREP; SEQ ID NO: 141), Softag 1 (SLAELLNAGLGGS; SEQ ID NO: 142), Softag 3 (TQDPSRVG; SEQ ID NO: 143), Spot-tag (PDRVRAVSHWSS; SEQ ID NO: 144), Strep-tag (WSHPQFEK; SEQ ID NO: 145), TC tag (CCPGCC; SEQ ID NO: 146), Ty tag (EVHTNQDPLD; SEQ ID NO: 147), V5 tag (GKPIPNPLLGLDST; SEQ ID NO: 148), VSV-tag (YTDIEMNRLGK; SEQ ID NO: 149), and Xpress tag (DLYDDDDK; SEQ ID NO: 150). In some embodiments, tissue factor protein is a peptide tag.

[0536] Peptide tags that can be included in a first chimeric polypeptide of a multi-chain chimeric polypeptide, a second chimeric polypeptide of the multi-chain chimeric polypeptide, or both, or a single-chain chimeric polypeptide can be used in any of a variety of applications related to the multi-chain or single-chain chimeric polypeptide, respectively. For example, a peptide tag can be used in the purification of a multi-chain or single-chain chimeric polypeptide. As one non-limiting example, a first chimeric polypeptide of a multi-chain chimeric polypeptide (e.g., a recombinantly expressed first chimeric polypeptide), a second chimeric polypeptide of the multi-chain chimeric polypeptide (e.g., a recombinantly expressed second chimeric polypeptide), or both, or a single-chain chimeric polypeptide, can include a myc tag; the multi-chain chimeric polypeptide that includes the myc-tagged first chimeric polypeptide, the myc-tagged second chimeric polypeptide, or both, or the myc-tagged single-chain chimeric polypeptide can be purified using an antibody that recognizes the myc tag(s). One non-limiting example of an antibody that recognizes a myc tag is 9E10, available from the non-commercial Developmental Studies Hybridoma Bank. As another non-limiting example, a first chimeric polypeptide of a multi-chain chimeric polypeptide (e.g., a recombinantly expressed first chimeric polypeptide), a second chimeric polypeptide of the multi-chain chimeric polypeptide (e.g., a recombinantly expressed second chimeric polypeptide), or both, or a single-chain chimeric polypeptide, can include a histidine tag; the multi-chain chimeric polypeptide that includes the histidine-tagged first chimeric polypeptide, the histidine-tagged second chimeric polypeptide, or both, or the histidine-tagged single-chain chimeric polypeptide can be purified using a nickel or cobalt chelate. Those of ordinary skill in the art will be aware of other suitable tags and agents that bind those tags for use in purifying a single-chain or multi-chain chimeric polypeptide. In some embodiments, a peptide tag is removed from the first chimeric polypeptide and/or the second chimeric polypeptide of the multi-chain chimeric polypeptide, or the single-chain chimeric polypeptide after purification. In some embodiments, a peptide tag is not removed from the first chimeric polypeptide and/or the second chimeric polypeptide of the multi-chain chimeric polypeptide, or the single-chain chimeric polypeptide, after purification.

[0537] Peptide tags that can be included in a first chimeric polypeptide of a multi-chain chimeric polypeptide, a second chimeric polypeptide of the multi-chain chimeric polypeptide, or both, or a single-chain chimeric polypeptide, can be used, for example, in immunoprecipitation of the multi-chain chimeric polypeptide or single-chain chimeric polypeptide, respectively, imaging of the multi-chain chimeric polypeptide or single-chain chimeric polypeptide, respectively (e.g., via Western blotting, ELISA, flow cytometry, and/or immunocytochemistry), and/or solubilization of the multi-chain chimeric polypeptide or single-chain chimeric polypeptide, respectively.

[0538] In some embodiments, a first chimeric polypeptide of a multi-chain chimeric polypeptide, a second chimeric polypeptide of the multi-chain chimeric polypeptide, or both, or a single-chain chimeric polypeptide, includes a peptide tag that is about 10 to 100 amino acids in length. For example, a peptide tag can be about 10 to 100 amino acids in length, about 15 to 100 amino acids in length, about 20 to 100 amino acids in length, about 25 to 100 amino acids in length, about 30 to 100 amino acids in length, about 35 to 100 amino acids in length, about 40 to 100 amino acids in length, about 45 to 100 amino acids in length, about 50 to 100 amino acids in length, about 55 to 100 amino acids in length, about 60 to 100 amino acids in length, about 65 to 100 amino acids in length, about 70 to 100 amino acids in length, about 75 to 100 amino acids in length, about 80 to 100 amino acids in length, about 85 to 100 amino acids in length, about 90 to 100 amino acids in length, about 95 to 100 amino acids in length, about 10 to 95 amino acids in length, about 10 to 90 amino acids in length, about 10 to 85 amino acids in length, about 10 to 80 amino acids in length, about 10 to 75 amino acids in length, about 10 to 70 amino acids in length, about 10 to 65 amino acids in length, about 10 to 60 amino acids in length, about 10 to 55 amino acids in length, about 10 to 50 amino acids in length, about 10 to 45 amino acids in length, about 10 to 40 amino acids in length, about 10 to 35 amino acids in length, about 10 to 30 amino acids in length, about 10 to 25 amino acids in length, about 10 to 20 amino acids in length, about 10 to 15 amino acids in length, about 20 to 30 amino acids in length, about 30 to 40 amino acids in length, about 40 to 50 amino acids in length, about 50 to 60 amino acids in length, about 60 to 70 amino acids in length, about 70 to 80 amino acids in length, about 80 to 90 amino acids in length, about 90 to 100 amino acids in length, about 20 to 90 amino acids in length, about 30 to 80 amino acids in length, about 40 to 70 amino acids in length, about 50 to 60 amino acids in length, or any range in between. In some embodiments, a peptide tag is about 10, 15, 20, 25, 30, 35, 40, 45, 50, 55, 60, 65, 70, 75, 80, 85, 90, 95, or 100 amino acids in length.

[0539] Peptide tags included in a first chimeric polypeptide of a multi-chain chimeric polypeptide, a second chimeric polypeptide of the multi-chain chimeric polypeptide, or both, or a single-chain chimeric polypeptide, can be of any suitable length. For example, peptide tags can be 5, 6, 7, 8, 9, 10, 11, 12, 13, 14, 15, 16, 17, 18, 19, 20, or more amino acids in length. In embodiments in which a single-chain or multi-chain chimeric polypeptide includes two or more peptide tags, the two or more peptide tags can be of the same or different lengths. In some embodiments, any of the peptide tags disclosed herein may include one or more additional amino acids (e.g., 1, 2, 3, 5, 6, 7, 8, 9, 10, or more amino acids) at the N-terminus and/or C-terminus, so long as the function of the peptide tag remains intact. For example, a myc tag having the amino acid sequence EQKLISEEDL (SEQ ID NO: 138) can include one or more additional amino acids (e.g., at the N-terminus and/or the C-terminus of the peptide tag), while still retaining the ability to be bound by an antibody (e.g., 9E10).

### Exemplary Embodiments of Single-Chain Chimeric Polypeptides—Type A

[0540] In some embodiments of any of the single-chain chimeric polypeptides described herein, the first target-binding domain and/or the second target-binding domain can independently bind specifically to CD3 (e.g., human CD3) or CD28 (e.g., human CD28). In some embodiments, the first target-binding domain binds specifically to CD3 (e.g., human CD3) and the second target-binding domain binds specifically to CD28 (e.g., human CD28). In some embodiments, the first target-binding domain binds specifically to CD28 (e.g., human CD28) and the second target-binding domain binds specifically to CD3 (e.g., human CD3).

[0541] In some embodiments of these single-chain chimeric polypeptides, the first target-binding domain and the soluble tissue factor domain directly abut each other. In some embodiments of these single-chain chimeric polypeptides, the single-chain chimeric polypeptide further includes a linker sequence (e.g., any of the exemplary linkers described herein) between the first target-binding domain and the soluble tissue factor domain.

[0542] In some embodiments of these single-chain chimeric polypeptides, the soluble tissue factor domain and the second target-binding domain directly abut each other. In some embodiments of these single-chain chimeric polypeptides, the single-chain chimeric polypeptide further includes a linker sequence (e.g., any of the exemplary linkers described herein) between the soluble tissue factor domain and the second target-binding domain.

[0543] In some embodiments of these single-chain chimeric polypeptides, one or both of the first target-binding domain and the second target-binding domain is an antigen-binding domain. In some embodiments of these single-chain chimeric polypeptides, the first target-binding domain and the second target-binding domain are each an antigen-binding domain (e.g., any of the exemplary antigen-binding domains described herein). In some embodiments of these single-chain chimeric polypeptides, the antigen-binding domain includes a scFv or a single domain antibody.

[0544] A non-limiting example of an scFv that binds specifically to CD3 can include a sequence that is at least 80% identical (e.g., at least 82% identical, at least 84% identical, at least 86% identical, at least 88% identical, at least 90% identical, at least 92% identical, at least 94% identical, at least 96% identical, at least 98% identical, at least 99% identical, or 100% identical) to:

(SEQ ID NO: 151)
QIVLTQSPAIMSASPGEKVTMTCSASSSVSYMNWYQQKSGTSPKRWIYDT
SKLASGVPAHFRGSGSGTSYSLTISGMEAEDAATYYCQQWSSNPFTFGSG
TKLEINRGGGGSGGGGSGGGGSQVQLQQSGAELARPGASVKMSCKASGYT
FTRYTMHWVKQRPGQGLEWIGYINPSRGYTNYNQKFKDKATLTTDKSSST
AYMQLSSLTSEDSAVYYCARYYDDHYCLDYWGQGTTLTVSS.

[0545] In some embodiments, an scFv that binds specifically to CD3 can be encoded by a sequence that is at least 80% identical (e.g., at least 82% identical, at least 84% identical, at least 86% identical, at least 88% identical, at least 90% identical, at least 92% identical, at least 94% identical, at least 96% identical, at least 98% identical, at least 99% identical, or 100% identical) to:

(SEQ ID NO: 152)
CAGATCGTGCTGACCCAAAGCCCCGCCATCATGAGCGCTAGCCCCGGTGA
GAAGGTGACCATGACATGCTCCGCTTCCAGCTCCGTGTCCTACATGAACT
GGTATCAGCAGAAAAGCGGAACCAGCCCCAAAAGGTGGATCTACGACACC
AGCAAGCTGGCCTCCGGAGTGCCCGCTCATTTCCGGGGCTCTGGATCCGG
CACCAGCTACTCTTTAACCATTTCCGGCATGGAAGCTGAAGACGCTGCCA
CCTACTATTGCCAGCAATGGAGCAGCAACCCCTTCACATTCGGATCTGGC
ACCAAGCTCGAAATCAATCGTGGAGGAGGTGGCAGCGGCGGCGGTGGATC
CGGCGGAGGAGGAAGCCAAGTTCAACTCCAGCAGAGCGGCGCTGAACTGG
CCCGGCCCGGCGCCTCCGTCAAGATGAGCTGCAAGGCTTCCGGCTATACA
TTTACTCGTTACACAATGCATTGGGTCAAGCAGAGGCCCGGTCAAGGTTT
AGAGTGGATCGGATATATCAACCCTTCCCGGGGCTACACCAACTATAACC
AAAAGTTCAAGGATAAAGCCACTTTAACCACTGACAAGAGCTCCTCCACC
GCCTACATGCAGCTGTCCTCTTTAACCAGCGAGGACTCCGCTGTTTACTA
CTGCGCTAGGTATTACGACGACCACTACTGTTTAGACTATTGGGGACAAG
GTACCACTTTAACCGTCAGCAGC.

[0546] A non-limiting example of an scFv that binds specifically to CD28 can include a sequence that is at least 80% identical (e.g., at least 82% identical, at least 84% identical, at least 86% identical, at least 88% identical, at least 90% identical, at least 92% identical, at least 94% identical, at least 96% identical, at least 98% identical, at least 99% identical, or 100% identical) to:

(SEQ ID NO: 153)
VQLQQSGPELVKPGASVKMSCKASGYTFTSYVIQWVKQKPGQGLEWIGSI
NPYNDYTKYNEKFKGKATLTSDKSSITAYMEFSSLTSEDSALYYCARWGD
GNYWGRGTTLTVSSGGGGSGGGGSGGGGSDIEMTQSPAIMSASLGERVTM
TCTASSSVSSSYFHWYQQKPGSSPKLCIYSTSNLASGVPPRFSGSGSTSY
SLTISSMEAEDAATYFCHQYHRSPTFGGGTKLETKR.

[0547] In some embodiments, an scFv that binds specifically to CD28 can be encoded by a sequence that is at least 80% identical (e.g., at least 82% identical, at least 84% identical, at least 86% identical, at least 88% identical, at least 90% identical, at least 92% identical, at least 94% identical, at least 96% identical, at least 98% identical, at least 99% identical, or 100% identical) to:

(SEQ ID NO: 154)
GTCCAGCTGCAGCAGAGCGGACCCGAACTCGTGAAACCCGGTGCTTCCGT
GAAAATGTCTTGTAAGGCCAGCGGATACACCTTCACCTCCTATGTGATCC
AGTGGGTCAAACAGAAGCCCGGACAAGGTCTCGAGTGGATCGGCAGCATC
AACCCTTACAACGACTATACCAAATACAACGAGAAGTTTAAGGGAAAGGC
TACTTTAACCTCCGACAAAAGCTCCATCACAGCCTACATGGAGTTCAGCT
CTTTAACATCCGAGGACAGCGCTCTGTACTATTGCGCCCGGTGGGGCGAC
GGCAATTACTGGGGACGGGGCACAACACTGACCGTGAGCAGCGGAGGCGG
AGGCTCCGGCGGAGGCGGATCTGGCGGTGGCGGCTCCGACATCGAGATGA
CCCAGTCCCCCGCTATCATGTCCGCCTCTTTAGGCGAGCGGGTCACAATG
ACTTGTACAGCCTCCTCCAGCGTCTCCTCCTCCTACTTCCATTGGTACCA
ACAGAAACCCGGAAGCTCCCCTAAACTGTGCATCTACAGCACCAGCAATC
TCGCCAGCGGCGTGCCCCCTAGGTTTTCCGGAAGCGGAAGCACCAGCTAC
TCTTTAACCATCTCCTCCATGGAGGCTGAGGATGCCGCCACCTACTTTTG
TCACCAGTACCACCGGTCCCCCACCTTCGGAGGCGGCACCAAACTGGAGA
CAAAGAGG.

[0548] In some embodiments of these single-chain chimeric polypeptides, the first target-binding domain and/or the second target-binding domain is a soluble receptor (e.g., a soluble CD28 receptor or a soluble CD3 receptor). In some embodiments of these single-chain chimeric polypeptides, the soluble tissue factor domain can be any of the exemplary soluble tissue factor domains described herein.

[0549] In some embodiments, a single-chain chimeric polypeptide can include a sequence that is at least 80% identical (e.g., at least 82% identical, at least 84% identical, at least 86% identical, at least 88% identical, at least 90% identical, at least 92% identical, at least 94% identical, at least 96% identical, at least 98% identical, at least 99% identical, or 100% identical) to:

(SEQ ID NO: 155)
QIVLTQSPAIMSASPGEKVTMTCSASSSVSYMNWYQQKSGTSPKRWIYDT
SKLASGVPAHFRGSGSGTSYSLTISGMEAEDAATYYCQQWSSNPFTFGSG
TKLEINRGGGGSGGGGSGGGGSQVQLQQSGAELARPGASVKMSCKASGYT
FTRYTMHWVKQRPGQGLEWIGYINPSRGYTNYNQKFKDKATLTTDKSSST
AYMQLSSLTSEDSAVYYCARYYDDHYCLDYWGQGTTLTVSSSGTTNTVAA
YNLTWKSTNFKTILEWEPKPVNQVYTVQISTKSGDWKSKCFYTTDTECDL
TDEIVKDVKQTYLARVFSYPAGNVESTGSAGEPLYENSPEFTPYLETNLG
QPTIQSFEQVGTKVNVTVEDERTLVRRNNTFLSLRDVFGKDLIYTLYYWK
SSSSGKKTAKTNTNEFLIDVDKGENYCFSVQAVIPSRTVNRKSTDSPVEC
MGQEKGEFREVQLQQSGPELVKPGASVKMSCKASGYTFTSYVIQWVKQKP
GQGLEWIGSINPYNDYTKYNEKFKGKATLTSDKSSITAYMEFSSLTSEDS
ALYYCARWGDGNYWGRGTTLTVSSGGGGSGGGGSGGGGSDIEMTQSPAIM
SASLGERVTMTCTASSSVSSSYFHWYQQKPGSSPKLCIYSTSNLASGVPP
RFSGSGSTSYSLTISSMEAEDAATYFCHQYHRSPTFGGGTKLETKR.

[0550] In some embodiments, a single-chain chimeric polypeptide is encoded by a sequence that is at least 80% identical (e.g., at least 82% identical, at least 84% identical, at least 86% identical, at least 88% identical, at least 90% identical, at least 92% identical, at least 94% identical, at least 96% identical, at least 98% identical, at least 99% identical, or 100% identical) to:

(SEQ ID NO: 156)
CAGATCGTGCTGACCCAAAGCCCCGCCATCATGAGCGCTAGCCCCGGTGA
GAAGGTGACCATGACATGCTCCGCTTCCAGCTCCGTGTCCTACATGAACT
GGTATCAGCAGAAAAGCGGAACCAGCCCCAAAAGGTGGATCTACGACACC
AGCAAGCTGGCCTCCGGAGTGCCCGCTCATTTCCGGGGCTCTGGATCCGG
CACCAGCTACTCTTTAACCATTTCCGGCATGGAAGCTGAAGACGCTGCCA
CCTACTATTGCCAGCAATGGAGCAGCAACCCCTTCACATTCGGATCTGGC
ACCAAGCTCGAAATCAATCGTGGAGGAGGTGGCAGCGGCGGCGGTGGATC
CGGCGGAGGAGGAAGCCAAGTTCAACTCCAGCAGAGCGGCGCTGAACTGG
CCCGGCCCGGCGCCTCCGTCAAGATGAGCTGCAAGGCTTCCGGCTATACA
TTTACTCGTTACACAATGCATTGGGTCAAGCAGAGGCCCGGTCAAGGTTT
AGAGTGGATCGGATATATCAACCCTTCCCGGGGCTACACCAACTATAACC
AAAAGTTCAAGGATAAAGCCACTTTAACCACTGACAAGAGCTCCTCCACC
GCCTACATGCAGCTGTCCTCTTTAACCAGCGAGGACTCCGCTGTTTACTA
CTGCGCTAGGTATTACGACGACCACTACTGTTTAGACTATTGGGGACAAG
GTACCACTTTAACCGTCAGCAGCTCCGGCACCACCAATACCGTGGCCGCT
TATAACCTCACATGGAAGAGCACCAACTTCAAGACAATTCTGGAATGGGA
ACCCAAGCCCGTCAATCAAGTTTACACCGTGCAGATCTCCACCAAATCCG
GAGACTGGAAGAGCAAGTGCTTCTACACAACAGACACCGAGTGTGATTTA
ACCGACGAAATCGTCAAGGACGTCAAGCAAACCTATCTGGCTCGGGTCTT
TTCCTACCCCGCTGGCAATGTCGAGTCCACCGGCTCCGCTGGCGAGCCTC
TCTACGAGAATTCCCCCGAATTCACCCCTTATTTAGAGACCAATTTAGGC
CAGCCTACCATCCAGAGCTTCGAGCAAGTTGGCACCAAGGTGAACGTCAC
CGTCGAGGATGAAAGGACTTTAGTGCGGCGGAATAACACATTTTTATCCC
TCCGGGATGTGTTCGGCAAAGACCTCATCTACACACTGTACTATTGGAAG
TCCAGCTCCTCCGGCAAAAAGACCGCTAAGACCAACACCAACGAGTTTTT
AATTGACGTGGACAAAGGCGAGAACTACTGCTTCAGCGTGCAAGCCGTGA
TCCCTTCTCGTACCGTCAACCGGAAGAGCACAGATTCCCCCGTTGAGTGC
ATGGGCCAAGAAAAGGGCGAGTTCCGGGAGGTCCAGCTGCAGCAGAGCGG
ACCCGAACTCGTGAAACCCGGTGCTTCCGTGAAAATGTCTTGTAAGGCCA
GCGGATACACCTTCACCTCCTATGTGATCCAGTGGGTCAAACAGAAGCCC
GGACAAGGTCTCGAGTGGATCGGCAGCATCAACCCTTACAACGACTATAC
CAAATACAACGAGAAGTTTAAGGGAAAGGCTACTTTAACCTCCGACAAAA
GCTCCATCACAGCCTACATGGAGTTCAGCTCTTTAACATCCGAGGACAGC
GCTCTGTACTATTGCGCCCGGTGGGGCGACGGCAATTACTGGGGACGGGG
CACAACACTGACCGTGAGCAGCGGAGGCGGAGGCTCCGGCGGAGGCGGAT
CTGGCGGTGGCGGCTCCGACATCGAGATGACCCAGTCCCCCGCTATCATG
TCCGCCTCTTTAGGCGAGCGGGTCACAATGACTTGTACAGCCTCCTCCAG
CGTCTCCTCCTCCTACTTCCATTGGTACCAACAGAAACCCGGAAGCTCCC
CTAAACTGTGCATCTACAGCACCAGCAATCTCGCCAGCGGCGTGCCCCCT
AGGTTTTCCGGAAGCGGAAGCACCAGCTACTCTTTAACCATCTCCTCCAT
GGAGGCTGAGGATGCCGCCACCTACTTTTGTCACCAGTACCACCGGTCCC
CCACCTTCGGAGGCGGCACCAAACTGGAGACAAAGAGG.

[0551] In some embodiments, a single-chain chimeric polypeptide can include a sequence that is at least 80% identical (e.g., at least 82% identical, at least 84% identical, at least 86% identical, at least 88% identical, at least 90% identical, at least 92% identical, at least 94% identical, at least 96% identical, at least 98% identical, at least 99% identical, or 100% identical) to:

(SEQ ID NO: 157)
MKWVTFISLLFLFSSAYSQIVLTQSPAIMSASPGEKVTMTCSASSSVSYM
NWYQQKSGTSPKRWIYDTSKLASGVPAHFRGSGSGTSYSLTISGMEAEDA
ATYYCQQWSSNPFTFGSGTKLEINRGGGGSGGGGSGGGGSQVQLQQSGAE
LARPGASVKMSCKASGYTFTRYTMHWVKQRPGQGLEWIGYINPSRGYTNY
NQKFKDKATLTTDKSSSTAYMQLSSLTSEDSAVYYCARYYDDHYCLDYWG
QGTTLTVSSSGTTNTVAAYNLTWKSTNFKTILEWEPKPVNQVYTVQISTK
SGDWKSKCFYTTDTECDLTDEIVKDVKQTYLARVFSYPAGNVESTGSAGE
PLYENSPEFTPYLETNLGQPTIQSFEQVGTKVNVTVEDERTLVRRNNTFL
SLRDVFGKDLIYTLYYWKSSSSGKKTAKTNTNEFLIDVDKGENYCFSVQA
VIPSRTVNRKSTDSPVECMGQEKGEFREVQLQQSGPELVKPGASVKMSCK
ASGYTFTSYVIQWVKQKPGQGLEWIGSINPYNDYTKYNEKFKGKATLTSD
KSSITAYMEFSSLTSEDSALYYCARWGDGNYWGRGTTLTVSSGGGGSGGG
GSGGGGSDIEMTQSPAIMSASLGERVTMTCTASSSVSSSYFHWYQQKPGS
SPKLCIYSTSNLASGVPPRFSGSGSTSYSLTISSMEAEDAATYFCHQYHR
SPTFGGGTKLETKR.

[0552] In some embodiments, a single-chain chimeric polypeptide is encoded by a sequence that is at least 80% identical (e.g., at least 82% identical, at least 84% identical, at least 86% identical, at least 88% identical, at least 90% identical, at least 92% identical, at least 94% identical, at least 96% identical, at least 98% identical, at least 99% identical, or 100% identical) to:

(SEQ ID NO: 158)
ATGAAGTGGGTGACCTTCATCAGCTTATTATTTTTATTCAGCTCCGCCTA
TTCCCAGATCGTGCTGACCCAAAGCCCCGCCATCATGAGCGCTAGCCCCG
GTGAGAAGGTGACCATGACATGCTCCGCTTCCAGCTCCGTGTCCTACATG
AACTGGTATCAGCAGAAAAGCGGAACCAGCCCCAAAAGGTGGATCTACGA
CACCAGCAAGCTGGCCTCCGGAGTGCCCGCTCATTTCCGGGGCTCTGGAT
CCGGCACCAGCTACTCTTTAACCATTTCCGGCATGGAAGCTGAAGACGCT
GCCACCTACTATTGCCAGCAATGGAGCAGCAACCCCTTCACATTCGGATC
TGGCACCAAGCTCGAAATCAATCGTGGAGGAGGTGGCAGCGGCGGCGGTG
GATCCGGCGGAGGAGGAAGCCAAGTTCAACTCCAGCAGAGCGGCGCTGAA
CTGGCCCGGCCCGGCGCCTCCGTCAAGATGAGCTGCAAGGCTTCCGGCTA
TACATTTACTCGTTACACAATGCATTGGGTCAAGCAGAGGCCCGGTCAAG
GTTTAGAGTGGATCGGATATATCAACCCTTCCCGGGGCTACACCAACTAT
AACCAAAAGTTCAAGGATAAAGCCACTTTAACCACTGACAAGAGCTCCTC
CACCGCCTACATGCAGCTGTCCTCTTTAACCAGCGAGGACTCCGCTGTTT
ACTACTGCGCTAGGTATTACGACGACCACTACTGTTTAGACTATTGGGGA
CAAGGTACCACTTTAACCGTCAGCAGCTCCGGCACCACCAATACCGTGGC
CGCTTATAACCTCACATGGAAGAGCACCAACTTCAAGACAATTCTGGAAT
GGGAACCCAAGCCCGTCAATCAAGTTTACACCGTGCAGATCTCCACCAAA
TCCGGAGACTGGAAGAGCAAGTGCTTCTACACAACAGACACCGAGTGTGA
TTTAACCGACGAAATCGTCAAGGACGTCAAGCAAACCTATCTGGCTCGGG
TCTTTTCCTACCCCGCTGGCAATGTCGAGTCCACCGGCTCCGCTGGCGAG
CCTCTCTACGAGAATTCCCCCGAATTCACCCCTTATTTAGAGACCAATTT
AGGCCAGCCTACCATCCAGAGCTTCGAGCAAGTTGGCACCAAGGTGAACG
TCACCGTCGAGGATGAAAGGACTTTAGTGCGGCGGAATAACACATTTTTA
TCCCTCCGGGATGTGTTCGGCAAAGACCTCATCTACACACTGTACTATTG
GAAGTCCAGCTCCTCCGGCAAAAAGACCGCTAAGACCAACACCAACGAGT
TTTTAATTGACGTGGACAAAGGCGAGAACTACTGCTTCAGCGTGCAAGCC
GTGATCCCTTCTCGTACCGTCAACCGGAAGAGCACAGATTCCCCCGTTGA
GTGCATGGGCCAAGAAAAGGGCGAGTTCCGGGAGGTCCAGCTGCAGCAGA
GCGGACCCGAACTCGTGAAACCCGGTGCTTCCGTGAAAATGTCTTGTAAG
GCCAGCGGATACACCTTCACCTCCTATGTGATCCAGTGGGTCAAACAGAA
GCCCGGACAAGGTCTCGAGTGGATCGGCAGCATCAACCCTTACAACGACT
ATACCAAATACAACGAGAAGTTTAAGGGAAAGGCTACTTTAACCTCCGAC
AAAAGCTCCATCACAGCCTACATGGAGTTCAGCTCTTTAACATCCGAGGA
CAGCGCTCTGTACTATTGCGCCCGGTGGGGCGACGGCAATTACTGGGGAC
GGGGCACAACACTGACCGTGAGCAGCGGAGGCGGAGGCTCCGGCGGAGGC
GGATCTGGCGGTGGCGGCTCCGACATCGAGATGACCCAGTCCCCCGCTAT
CATGTCCGCCTCTTTAGGCGAGCGGGTCACAATGACTTGTACAGCCTCCT
CCAGCGTCTCCTCCTCCTACTTCCATTGGTACCAACAGAAACCCGGAAGC
TCCCCTAAACTGTGCATCTACAGCACCAGCAATCTCGCCAGCGGCGTGCC
CCCTAGGTTTTCCGGAAGCGGAAGCACCAGCTACTCTTTAACCATCTCCT
CCATGGAGGCTGAGGATGCCGCCACCTACTTTTGTCACCAGTACCACCGG
TCCCCCACCTTCGGAGGCGGCACCAAACTGGAGACAAAGAGG.

### Exemplary Embodiments of Single-Chain Chimeric Polypeptides—Type B

[0553] In some embodiments of any of the single-chain chimeric polypeptides described herein, the first target-binding domain and/or the second target-binding domain can independently bind specifically to an IL-2 receptor (e.g., human IL-2 receptor).

[0554] In some embodiments of these single-chain chimeric polypeptides, the first target-binding domain and the soluble tissue factor domain directly abut each other. In some embodiments of these single-chain chimeric polypeptides, the single-chain chimeric polypeptide further includes a linker sequence (e.g., any of the exemplary linkers described herein) between the first target-binding domain and the soluble tissue factor domain.

[0555] In some embodiments of these single-chain chimeric polypeptides, the soluble tissue factor domain and the second target-binding domain directly abut each other. In some embodiments of these single-chain chimeric polypeptides, the single-chain chimeric polypeptide further includes a linker sequence (e.g., any of the exemplary linkers described herein) between the soluble tissue factor domain and the second target-binding domain.

[0556] In some embodiments of these single-chain chimeric polypeptides, the first target-binding domain and the second target-binding domain is a soluble human IL-2 protein. A non-limiting example of an IL-2 protein that binds specifically to an IL-2 receptor can include a sequence that is at least 80% identical (e.g., at least 82% identical, at least 84% identical, at least 86% identical, at least 88% identical, at least 90% identical, at least 92% identical, at least 94% identical, at least 96% identical, at least 98% identical, at least 99% identical, or 100% identical) to:

(SEQ ID NO: 78)
[sequence omitted]

[0557] In some embodiments, an IL-2 protein that binds specifically to an IL-2 receptor can be encoded by a sequence that is at least 80% identical (e.g., at least 82% identical, at least 84% identical, at least 86% identical, at least 88% identical, at least 90% identical, at least 92% identical, at least 94% identical, at least 96% identical, at least 98% identical, at least 99% identical, or 100% identical) to:

(SEQ ID NO: 159)
GCACCTACTTCAAGTTCTACAAAGAAAACACAGCTACAACTGGAGCATTT
ACTGCTGGATTTACAGATGATTTTGAATGGAATTAATAATTACAAGAATC
CCAAACTCACCAGGATGCTCACATTTAAGTTTTACATGCCCAAGAAGGCC
ACAGAACTGAAACATCTTCAGTGTCTAGAAGAAGAACTCAAACCTCTGGA
GGAAGTGCTAAATTTAGCTCAAAGCAAAAACTTTCACTTAAGACCCAGGG
ACTTAATCAGCAATATCAACGTAATAGTTCTGGAACTAAAGGGATCTGAA
ACAACATTCATGTGTGAATATGCTGATGAGACAGCAACCATTGTAGAATT
TCTGAACAGATGGATTACCTTTTGTCAAAGCATCATCTCAACACTAACT.

[0558] In some embodiments, an IL-2 protein that binds specifically to an IL-2 receptor can be encoded by a sequence that is at least 80% identical (e.g., at least 82% identical, at least 84% identical, at least 86% identical, at least 88% identical, at least 90% identical, at least 92% identical, at least 94% identical, at least 96% identical, at least 98% identical, at least 99% identical, or 100% identical) to:

(SEQ ID NO: 160)
GCCCCCACCTCCTCCTCCACCAAGAAGACCCAGCTGCAGCTGGAGCATTT
ACTGCTGGATTTACAGATGATTTTAAACGGCATCAACAACTACAAGAACC
CCAAGCTGACTCGTATGCTGACCTTCAAGTTCTACATGCCCAAGAAGGCC
ACCGAGCTGAAGCATTTACAGTGTTTAGAGGAGGAGCTGAAGCCCCTCGA
GGAGGTGCTGAATTTAGCCCAGTCCAAGAATTTCCATTTAAGGCCCCGGG
ATTTAATCAGCAACATCAACGTGATCGTTTTAGAGCTGAAGGGCTCCGAG
ACCACCTTCATGTGCGAGTACGCCGACGAGACCGCCACCATCGTGGAGTT
TTTAAATCGTTGGATCACCTTCTGCCAGTCCATCATCTCCACTTTAACC.

[0559] In some embodiments of these single-chain chimeric polypeptides, the soluble tissue factor domain can be any of the exemplary soluble tissue factor domains described herein.

[0560] In some embodiments, a single-chain chimeric polypeptide can include a sequence that is at least 80% identical (e.g., at least 82% identical, at least 84% identical, at least 86% identical, at least 88% identical, at least 90% identical, at least 92% identical, at least 94% identical, at least 96% identical, at least 98% identical, at least 99% identical, or 100% identical) to:

(SEQ ID NO: 161)
APTSSSTKKTQLQLEHLLLDLQMILNGINNYKNPKLTRMLTFKFYMPKKA
TELKHLQCLEEELKPLEEVLNLAQSKNFHLRPRDLISNINVIVLELKGSE
TTFMCEYADETATIVEFLNRWITFCQSIISTLTSGTTNTVAAYNLTWKST
NFKTILEWEPKPVNQVYTVQISTKSGDWKSKCFYTTDTECDLTDEIVKDV
KQTYLARVFSYPAGNVESTGSAGEPLYENSPEFTPYLETNLGQPTIQSFE
QVGTKVNVTVEDERTLVRRNNTFLSLRDVFGKDLIYTLYYWKSSSSGKKT
AKTNTNEFLIDVDKGENYCFSVQAVIPSRTVNRKSTDSPVECMGQEKGEF
REAPTSSSTKKTQLQLEHLLLDLQMILNGINNYKNPKLTRMLTFKFYMPK
KATELKHLQCLEEELKPLEEVLNLAQSKNFHLRPRDLISNINVIVLELKG
SETTFMCEYADETATIVEFLNRWITFCQSIISTLT.

[0561] In some embodiments, a single-chain chimeric polypeptide is encoded by a sequence that is at least 80% identical (e.g., at least 82% identical, at least 84% identical, at least 86% identical, at least 88% identical, at least 90% identical, at least 92% identical, at least 94% identical, at least 96% identical, at least 98% identical, at least 99% identical, or 100% identical) to:

(SEQ ID NO: 162)
GCCCCCACCTCCTCCTCCACCAAGAAGACCCAGCTGCAGCTGGAGCATTT
ACTGCTGGATTTACAGATGATTTTAAACGGCATCAACAACTACAAGAACC
CCAAGCTGACTCGTATGCTGACCTTCAAGTTCTACATGCCCAAGAAGGCC
ACCGAGCTGAAGCATTTACAGTGTTTAGAGGAGGAGCTGAAGCCCCTCGA
GGAGGTGCTGAATTTAGCCCAGTCCAAGAATTTCCATTTAAGGCCCCGGG
ATTTAATCAGCAACATCAACGTGATCGTTTTAGAGCTGAAGGGCTCCGAG
ACCACCTTCATGTGCGAGTACGCCGACGAGACCGCCACCATCGTGGAGTT
TTTAAATCGTTGGATCACCTTCTGCCAGTCCATCATCTCCACTTTAACCA
GCGGCACAACCAACACAGTCGCTGCCTATAACCTCACTTGGAAGAGCACC
AACTTCAAAACCATCCTCGAATGGGAACCCAAACCCGTTAACCAAGTTTA
CACCGTGCAGATCAGCACCAAGTCCGGCGACTGGAAGTCCAAATGTTTCT
ATACCACCGACACCGAGTGCGATCTCACCGATGAGATCGTGAAAGATGTG
AAACAGACCTACCTCGCCCGGGTGTTTAGCTACCCCGCCGGCAATGTGGA
GAGCACTGGTTCCGCTGGCGAGCCTTTATACGAGAACAGCCCCGAATTTA
CCCCTTACCTCGAGACCAATTTAGGACAGCCCACCATCCAAAGCTTTGAG
CAAGTTGGCACAAAGGTGAATGTGACAGTGGAGGACGAGCGGACTTTAGT
GCGGCGGAACAACACCTTTCTCAGCCTCCGGGATGTGTTCGGCAAAGATT
TAATCTACACACTGTATTACTGGAAGTCCTCTTCCTCCGGCAAGAAGACA
GCTAAAACCAACACAAACGAGTTTTTAATCGACGTGGATAAAGGCGAAAA
CTACTGTTTCAGCGTGCAAGCTGTGATCCCCTCCCGGACCGTGAATAGGA
AAAGCACCGATAGCCCCGTTGAGTGCATGGGCCAAGAAAAGGGCGAGTTC
CGGGAGGCACCTACTTCAAGTTCTACAAAGAAAACACAGCTACAACTGGA
GCATTTACTGCTGGATTTACAGATGATTTTGAATGGAATTAATAATTACA
AGAATCCCAAACTCACCAGGATGCTCACATTTAAGTTTTACATGCCCAAG
AAGGCCACAGAACTGAAACATCTTCAGTGTCTAGAAGAAGAACTCAAACC
TCTGGAGGAAGTGCTAAATTTAGCTCAAAGCAAAAACTTTCACTTAAGAC
CCAGGGACTTAATCAGCAATATCAACGTAATAGTTCTGGAACTAAAGGGA
TCTGAAACAACATTCATGTGTGAATATGCTGATGAGACAGCAACCATTGT
AGAATTTCTGAACAGATGGATTACCTTTTGTCAAAGCATCATCTCAACAC
TAACT.

[0562] In some embodiments, a single-chain chimeric polypeptide can include a sequence that is at least 80% identical (e.g., at least 82% identical, at least 84% identical, at least 86% identical, at least 88% identical, at least 90% identical, at least 92% identical, at least 94% identical, at least 96% identical, at least 98% identical, at least 99% identical, or 100% identical) to:

(SEQ ID NO: 163)
MKWVTFISLLFLFSSAYSAPTSSSTKKTQLQLEHLLLDLQMILNGINNYK
NPKLTRMLTFKFYMPKKATELKHLQCLEEELKPLEEVLNLAQSKNFHLRP
RDLISNINVIVLELKGSETTFMCEYADETATIVEFLNRWITFCQSIISTL
TSGTTNTVAAYNLTWKSTNFKTILEWEPKPVNQVYTVQISTKSGDWKSKC
FYTTDTECDLTDEIVKDVKQTYLARVFSYPAGNVESTGSAGEPLYENSPE
FTPYLETNLGQPTIQSFEQVGTKVNVTVEDERTLVRRNNTFLSLRDVFGK
DLIYTLYYWKSSSSGKKTAKTNTNEFLIDVDKGENYCFSVQAVIPSRTVN
RKSTDSPVECMGQEKGEFREAPTSSSTKKTQLQLEHLLLDLQMILNGINN
YKNPKLTRMLTFKFYMPKKATELKHLQCLEEELKPLEEVLNLAQSKNFHL
RPRDLISNINVIVLELKGSETTFMCEYADETATIVEFLNRWITFCQSIIS
TLT.

[0563] In some embodiments, a single-chain chimeric polypeptide is encoded by a sequence that is at least 80% identical (e.g., at least 82% identical, at least 84% identical, at least 86% identical, at least 88% identical, at least 90% identical, at least 92% identical, at least 94% identical, at least 96% identical, at least 98% identical, at least 99% identical, or 100% identical) to:

(SEQ ID NO: 164)
ATGAAGTGGGTGACCTTCATCAGCCTGCTGTTCCTGTTCTCCAGCGCCTA
CTCCGCCCCCACCTCCTCCTCCACCAAGAAGACCCAGCTGCAGCTGGAGC
ATTTACTGCTGGATTTACAGATGATTTTAAACGGCATCAACAACTACAAG
AACCCCAAGCTGACTCGTATGCTGACCTTCAAGTTCTACATGCCCAAGAA
GGCCACCGAGCTGAAGCATTTACAGTGTTTAGAGGAGGAGCTGAAGCCCC
TCGAGGAGGTGCTGAATTTAGCCCAGTCCAAGAATTTCCATTTAAGGCCC
CGGGATTTAATCAGCAACATCAACGTGATCGTTTTAGAGCTGAAGGGCTC
CGAGACCACCTTCATGTGCGAGTACGCCGACGAGACCGCCACCATCGTGG
AGTTTTTAAATCGTTGGATCACCTTCTGCCAGTCCATCATCTCCACTTTA
ACCAGCGGCACAACCAACACAGTCGCTGCCTATAACCTCACTTGGAAGAG
CACCAACTTCAAAACCATCCTCGAATGGGAACCCAAACCCGTTAACCAAG
TTTACACCGTGCAGATCAGCACCAAGTCCGGCGACTGGAAGTCCAAATGT
TTCTATACCACCGACACCGAGTGCGATCTCACCGATGAGATCGTGAAAGA
TGTGAAACAGACCTACCTCGCCCGGGTGTTTAGCTACCCCGCCGGCAATG
TGGAGAGCACTGGTTCCGCTGGCGAGCCTTTATACGAGAACAGCCCCGAA
TTTACCCCTTACCTCGAGACCAATTTAGGACAGCCCACCATCCAAAGCTT
TGAGCAAGTTGGCACAAAGGTGAATGTGACAGTGGAGGACGAGCGGACTT
TAGTGCGGCGGAACAACACCTTTCTCAGCCTCCGGGATGTGTTCGGCAAA
GATTTAATCTACACACTGTATTACTGGAAGTCCTCTTCCTCCGGCAAGAA
GACAGCTAAAACCAACACAAACGAGTTTTTAATCGACGTGGATAAAGGCG
AAAACTACTGTTTCAGCGTGCAAGCTGTGATCCCCTCCCGGACCGTGAAT
AGGAAAAGCACCGATAGCCCCGTTGAGTGCATGGGCCAAGAAAAGGGCGA
GTTCCGGGAGGCACCTACTTCAAGTTCTACAAAGAAAACACAGCTACAAC
TGGAGCATTTACTGCTGGATTTACAGATGATTTTGAATGGAATTAATAAT
TACAAGAATCCCAAACTCACCAGGATGCTCACATTTAAGTTTTACATGCC
CAAGAAGGCCACAGAACTGAAACATCTTCAGTGTCTAGAAGAAGAACTCA
AACCTCTGGAGGAAGTGCTAAATTTAGCTCAAAGCAAAAACTTTCACTTA
AGACCCAGGGACTTAATCAGCAATATCAACGTAATAGTTCTGGAACTAAA
GGGATCTGAAACAACATTCATGTGTGAATATGCTGATGAGACAGCAACCA
TTGTAGAATTTCTGAACAGATGGATTACCTTTTGTCAAAGCATCATCTCA
ACACTAACT.

### Exemplary Embodiments of Single-Chain Chimeric Polypeptides—Type C

[0564] In some embodiments of any of the single-chain chimeric polypeptides described herein, the first target-binding domain and/or the second target-binding domain can independently bind specifically to an IL-15 receptor (e.g., a human IL-15 receptor).

[0565] In some embodiments of these single-chain chimeric polypeptides, the first target-binding domain and the soluble tissue factor domain directly abut each other. In some embodiments of these single-chain chimeric polypeptides, the single-chain chimeric polypeptide further includes a linker sequence (e.g., any of the exemplary linkers described herein) between the first target-binding domain and the soluble tissue factor domain.

[0566] In some embodiments of these single-chain chimeric polypeptides, the soluble tissue factor domain and the second target-binding domain directly abut each other. In some embodiments of these single-chain chimeric polypeptides, the single-chain chimeric polypeptide further includes a linker sequence (e.g., any of the exemplary linkers described herein) between the soluble tissue factor domain and the second target-binding domain.

[0567] In some embodiments of these single-chain chimeric polypeptides, the first target-binding domain and the second target-binding domain is a soluble human IL-15 protein. A non-limiting example of an IL-15 protein that binds specifically to an IL-15 receptor can include a sequence that is at least 80% identical (e.g., at least 82% identical, at least 84% identical, at least 86% identical, at least 88% identical, at least 90% identical, at least 92% identical, at least 94% identical, at least 96% identical, at least 98% identical, at least 99% identical, or 100% identical) to:

(SEQ ID NO: 82)
NWVNVISDLKKIEDLIQSMHIDATLYTESDVHPSCKVTAMKCFLLELQVI
SLESGDASIHDTVENLIILANNSLSSNGNVTESGCKECEELEEKNIKEFL
QSFVHIVQMFINTS.

[0568] In some embodiments, an IL-15 protein that binds specifically to an IL-15 receptor can be encoded by a sequence that is at least 80% identical (e.g., at least 82% identical, at least 84% identical, at least 86% identical, at least 88% identical, at least 90% identical, at least 92% identical, at least 94% identical, at least 96% identical, at least 98% identical, at least 99% identical, or 100% identical) to:

(SEQ ID NO: 165)
AACTGGGTGAACGTGATCAGCGATTTAAAGAAGATCGAGGATTTAATCCA
GAGCATGCACATCGACGCCACTCTGTACACTGAGAGCGACGTGCACCCTA
GCTGCAAGGTGACTGCCATGAAGTGCTTTTTACTGGAGCTGCAAGTTATC
TCTTTAGAGAGCGGCGATGCCAGCATCCACGACACTGTGGAGAATTTAAT
CATTTTAGCCAACAACTCTTTAAGCAGCAACGGCAACGTGACAGAGAGCG
GCTGCAAGGAGTGCGAGGAGCTGGAGGAGAAGAACATCAAGGAGTTTTTA
CAGAGCTTCGTGCACATCGTGCAGATGTTCATCAACACTAGC.

[0569] In some embodiments, an IL-15 protein that binds specifically to an IL-15 receptor can be encoded by a sequence that is at least 80% identical (e.g., at least 82% identical, at least 84% identical, at least 86% identical, at least 88% identical, at least 90% identical, at least 92% identical, at least 94% identical, at least 96% identical, at least 98% identical, at least 99% identical, or 100% identical) to:

(SEQ ID NO: 166)
AACTGGGTGAACGTCATCAGCGATTTAAAGAAGATCGAAGATTTAATTCA
GTCCATGCATATCGACGCCACTTTATACACAGAATCCGACGTGCACCCCT
CTTGTAAGGTGACCGCCATGAAATGTTTTTTACTGGAGCTGCAAGTTATC
TCTTTAGAGAGCGGAGACGCTAGCATCCACGACACCGTGGAGAATTTAAT
CATTTTAGCCAATAACTCTTTATCCAGCAACGGCAACGTGACAGAGTCCG
GCTGCAAGGAGTGCGAAGAGCTGGAGGAGAAGAACATCAAGGAGTTTCTG
CAATCCTTTGTGCACATTGTCCAGATGTTCATCAATACCTCC.

[0570] In some embodiments of these single-chain chimeric polypeptides, the soluble tissue factor domain can be any of the exemplary soluble tissue factor domains described herein.

[0571] In some embodiments, a single-chain chimeric polypeptide can include a sequence that is at least 80% identical (e.g., at least 82% identical, at least 84% identical, at least 86% identical, at least 88% identical, at least 90% identical, at least 92% identical, at least 94% identical, at least 96% identical, at least 98% identical, at least 99% identical, or 100% identical) to:

(SEQ ID NO: 167)
NWVNVISDLKKIEDLIQSMHIDATLYTESDVHPSCKVTAMKCFLLELQVI
SLESGDASIHDTVENLIILANNSLSSNGNVTESGCKECEELEEKNIKEFL
QSFVHIVQMFINTSSGTTNTVAAYNLTWKSTNFKTILEWEPKPVNQVYTV
QISTKSGDWKSKCFYTTDTECDLTDEIVKDVKQTYLARVFSYPAGNVEST
GSAGEPLYENSPEFTPYLETNLGQPTIQSFEQVGTKVNVTVEDERTLVRR
NNTFLSLRDVFGKDLIYTLYYWKSSSSGKKTAKTNTNEFLIDVDKGENYC
FSVQAVIPSRTVNRKSTDSPVECMGQEKGEFRENWVNVISDLKKIEDLIQ
SMHIDATLYTESDVHPSCKVTAMKCFLLELQVISLESGDASIHDTVENLI
ILANNSLSSNGNVTESGCKECEELEEKNIKEFLQSFVHIVQMFINTS.

[0572] In some embodiments, a single-chain chimeric polypeptide is encoded by a sequence that is at least 80% identical (e.g., at least 82% identical, at least 84% identical, at least 86% identical, at least 88% identical, at least 90% identical, at least 92% identical, at least 94% identical, at least 96% identical, at least 98% identical, at least 99% identical, or 100% identical) to:

(SEQ ID NO: 168)
AACTGGGTGAACGTGATCAGCGATTTAAAGAAGATCGAGGATTTAATCCA
GAGCATGCACATCGACGCCACTCTGTACACTGAGAGCGACGTGCACCCTA
GCTGCAAGGTGACTGCCATGAAGTGCTTTTTACTGGAGCTGCAAGTTATC
TCTTTAGAGAGCGGCGATGCCAGCATCCACGACACTGTGGAGAATTTAAT
CATTTTAGCCAACAACTCTTTAAGCAGCAACGGCAACGTGACAGAGAGCG
GCTGCAAGGAGTGCGAGGAGCTGGAGGAGAAGAACATCAAGGAGTTTTTA
CAGAGCTTCGTGCACATCGTGCAGATGTTCATCAACACTAGCAGCGGCAC
AACCAACACAGTCGCTGCCTATAACCTCACTTGGAAGAGCACCAACTTCA
AAACCATCCTCGAATGGGAACCCAAACCCGTTAACCAAGTTTACACCGTG
CAGATCAGCACCAAGTCCGGCGACTGGAAGTCCAAATGTTTCTATACCAC
CGACACCGAGTGCGATCTCACCGATGAGATCGTGAAAGATGTGAAACAGA
CCTACCTCGCCCGGGTGTTTAGCTACCCCGCCGGCAATGTGGAGAGCACT
GGTTCCGCTGGCGAGCCTTTATACGAGAACAGCCCCGAATTTACCCCTTA
CCTCGAGACCAATTTAGGACAGCCCACCATCCAAAGCTTTGAGCAAGTTG
GCACAAAGGTGAATGTGACAGTGGAGGACGAGCGGACTTTAGTGCGGCGG
AACAACACCTTTCTCAGCCTCCGGGATGTGTTCGGCAAAGATTTAATCTA
CACACTGTATTACTGGAAGTCCTCTTCCTCCGGCAAGAAGACAGCTAAAA
CCAACACAAACGAGTTTTTAATCGACGTGGATAAAGGCGAAAACTACTGT
TTCAGCGTGCAAGCTGTGATCCCCTCCCGGACCGTGAATAGGAAAAGCAC
CGATAGCCCCGTTGAGTGCATGGGCCAAGAAAAGGGCGAGTTCCGGGAGA
ACTGGGTGAACGTCATCAGCGATTTAAAGAAGATCGAAGATTTAATTCAG
TCCATGCATATCGACGCCACTTTATACACAGAATCCGACGTGCACCCCTC
TTGTAAGGTGACCGCCATGAAATGTTTTTTACTGGAGCTGCAAGTTATCT
CTTTAGAGAGCGGAGACGCTAGCATCCACGACACCGTGGAGAATTTAATC
ATTTTAGCCAATAACTCTTTATCCAGCAACGGCAACGTGACAGAGTCCGG
CTGCAAGGAGTGCGAAGAGCTGGAGGAGAAGAACATCAAGGAGTTTCTGC
AATCCTTTGTGCACATTGTCCAGATGTTCATCAATACCTCC.

[0573] In some embodiments, a single-chain chimeric polypeptide can include a sequence that is at least 80% identical (e.g., at least 82% identical, at least 84% identical, at least 86% identical, at least 88% identical, at least 90% identical, at least 92% identical, at least 94% identical, at least 96% identical, at least 98% identical, at least 99% identical, or 100% identical) to:

(SEQ ID NO: 169)
MKWVTFISLLFLFSSAYSNWVNVISDLKKIEDLIQSMHIDATLYTESDVH
PSCKVTAMKCFLLELQVISLESGDASIHDTVENLIILANNSLSSNGNVTE
SGCKECEELEEKNIKEFLQSFVHIVQMFINTSSGTTNTVAAYNLTWKSTN
FKTILEWEPKPVNQVYTVQISTKSGDWKSKCFYTTDTECDLTDEIVKDVK
QTYLARVFSYPAGNVESTGSAGEPLYENSPEFTPYLETNLGQPTIQSFEQ
VGTKVNVTVEDERTLVRRNNTFLSLRDVFGKDLIYTLYYWKSSSSGKKTA
KTNTNEFLIDVDKGENYCFSVQAVIPSRTVNRKSTDSPVECMGQEKGEFR
ENWVNVISDLKKIEDLIQSMIIIDATLYTESDVHPSCKVTAMKCFLLELQ
VISLESGDASIHDTVENLIILANNSLSSNGNVTESGCKECEELEEKNIKE
FLQSFVHIVQMFINTS.

[0574] In some embodiments, a single-chain chimeric polypeptide is encoded by a sequence that is at least 80% identical (e.g., at least 82% identical, at least 84% identical, at least 86% identical, at least 88% identical, at least 90% identical, at least 92% identical, at least 94% identical, at least 96% identical, at least 98% identical, at least 99% identical, or 100% identical) to:

(SEQ ID NO: 170)
ATGAAGTGGGTGACCTTCATCAGCCTGCTGTTCCTGTTCTCCAGCGCCTA
CTCCAACTGGGTGAACGTGATCAGCGATTTAAAGAAGATCGAGGATTTAA
TCCAGAGCATGCACATCGACGCCACTCTGTACACTGAGAGCGACGTGCAC
CCTAGCTGCAAGGTGACTGCCATGAAGTGCTTTTTACTGGAGCTGCAAGT
TATCTCTTTAGAGAGCGGCGATGCCAGCATCCACGACACTGTGGAGAATT
TAATCATTTTAGCCAACAACTCTTTAAGCAGCAACGGCAACGTGACAGAG
AGCGGCTGCAAGGAGTGCGAGGAGCTGGAGGAGAAGAACATCAAGGAGTT
TTTACAGAGCTTCGTGCACATCGTGCAGATGTTCATCAACACTAGCAGCG
GCACAACCAACACAGTCGCTGCCTATAACCTCACTTGGAAGAGCACCAAC
TTCAAAACCATCCTCGAATGGGAACCCAAACCCGTTAACCAAGTTTACAC
CGTGCAGATCAGCACCAAGTCCGGCGACTGGAAGTCCAAATGTTTCTATA
CCACCGACACCGAGTGCGATCTCACCGATGAGATCGTGAAAGATGTGAAA
CAGACCTACCTCGCCCGGGTGTTTAGCTACCCCGCCGGCAATGTGGAGAG
CACTGGTTCCGCTGGCGAGCCTTTATACGAGAACAGCCCCGAATTTACCC
CTTACCTCGAGACCAATTTAGGACAGCCCACCATCCAAAGCTTTGAGCAA
GTTGGCACAAAGGTGAATGTGACAGTGGAGGACGAGCGGACTTTAGTGCG
GCGGAACAACACCTTTCTCAGCCTCCGGGATGTGTTCGGCAAAGATTTAA
TCTACACACTGTATTACTGGAAGTCCTCTTCCTCCGGCAAGAAGACAGCT
AAAACCAACACAAACGAGTTTTTAATCGACGTGGATAAAGGCGAAAACTA
CTGTTTCAGCGTGCAAGCTGTGATCCCCTCCCGGACCGTGAATAGGAAAA
GCACCGATAGCCCCGTTGAGTGCATGGGCCAAGAAAAGGGCGAGTTCCGG
GAGAACTGGGTGAACGTCATCAGCGATTTAAAGAAGATCGAAGATTTAAT
TCAGTCCATGCATATCGACGCCACTTTATACACAGAATCCGACGTGCACC
CCTCTTGTAAGGTGACCGCCATGAAATGTTTTTTACTGGAGCTGCAAGTT
ATCTCTTTAGAGAGCGGAGACGCTAGCATCCACGACACCGTGGAGAATTT
AATCATTTTAGCCAATAACTCTTTATCCAGCAACGGCAACGTGACAGAGT
CCGGCTGCAAGGAGTGCGAAGAGCTGGAGGAGAAGAACATCAAGGAGTTT
CTGCAATCCTTTGTGCACATTGTCCAGATGTTCATCAATACCTCC.

### Exemplary Multi-Chain Chimeric Polypeptides—Type A

[0575] In some embodiments of any of the multi-chain chimeric polypeptides described herein, the first target-binding domain and the second targeting-binding domain each independently bind specifically to a receptor of IL-18 or a receptor of IL-12. In some examples of these multi-chain chimeric polypeptides, the first target-binding domain and the soluble tissue factor domain directly abut each other in the first chimeric polypeptide. In some examples of these multi-chain chimeric polypeptides, the first chimeric polypeptide further comprises a linker sequence (e.g., any of the exemplary linkers described herein) between the first target-binding domain and the soluble tissue factor domain in the first chimeric polypeptide.

[0576] In some embodiments of these multi-chain chimeric polypeptides, the second domain of the pair of affinity domains and the second target-binding domain directly abut each other in the second chimeric polypeptide. In some embodiments of these multi-chain chimeric polypeptides, the second chimeric polypeptide further includes a linker sequence (e.g., any of the exemplary linkers described herein) between the second domain of the pair of affinity domains and the second target-binding domain in the second chimeric polypeptide.

[0577] In some embodiments of these multi-chain chimeric polypeptides, the soluble tissue factor domain can be any of the exemplary soluble tissue factor domains described herein. In some embodiments of these multi-chain chimeric polypeptides, the pair of affinity domains can be any of the exemplary pairs of affinity domains described herein.

[0578] In some embodiments of these multi-chain chimeric polypeptides, one or both of the first target-binding domain and the second target-binding domain is an agonistic antigen-binding domain. In some embodiments of these multi-chain chimeric polypeptides, the first target-binding domain and the second target-binding domain are each agonistic antigen-binding domains. In some embodiments of these multi-chain chimeric polypeptides, the antigen-binding domain includes a scFv or single-domain antibody.

[0579] In some embodiments of these multi-chain chimeric polypeptides, one or both of the first target-binding domain and the second target-binding domain is a soluble IL-15 or a soluble IL-18. In some embodiments of these multi-chain chimeric polypeptides, the first target-binding domain and the second target-binding domain are each independently a soluble IL-15 or a soluble IL-18. In some embodiments of these multi-chain chimeric polypeptides, the first target-binding domain and the second target-binding domain both bind specifically to a receptor of IL-18 or a receptor of IL-12. In some embodiments of these multi-chain chimeric polypeptides, the first target-binding domain and the second target-binding domain bind specifically to the same epitope. In some embodiments of these multi-chain chimeric polypeptides, the first target-binding domain and the second target-binding domain include the same amino acid sequence.

[0580] In some embodiments of these multi-chain chimeric polypeptides, the first target-binding domain binds specifically to a receptor for IL-12, and the second target-binding domain binds specifically to a receptor for IL-18. In some embodiments of these multi-chain chimeric polypeptides, the first target-binding domain binds specifically to a receptor for IL-18, and the second target-binding domain bind specifically to a receptor for IL-12.

[0581] In some embodiments of these multi-chain chimeric polypeptides, the first target-binding domain includes a soluble IL-18 (e.g., a soluble human IL-18).

[0582] In some embodiments of these multi-chain chimeric polypeptides, the soluble human IL-18 includes a sequence that is at least 80% identical (e.g., at least 82% identical, at least 84% identical, at least 86% identical, at least 88% identical, at least 90% identical, at least 92% identical, at least 94% identical, at least 96% identical, at least 98% identical, at least 99% identical, or 100% identical) to:

(SEQ ID NO: 109)
YFGKLESKLSVIRNLNDQVLFIDQGNRPLFEDMTDSDCRDNAPRTIFIIS
MYKDSQPRGMAVTISVKCEKISTLSCENKIISFKEMNPPDNIKDTKSDII
FFQRSVPGHDNKMQFESSSYEGYFLACEKERDLFKLILKKEDELGDRSIM
FTVQNED.

[0583] In some embodiments of these multi-chain chimeric polypeptides, the soluble human IL-18 is encoded by a sequence that is at least 80% identical (e.g., at least 82% identical, at least 84% identical, at least 86% identical, at least 88% identical, at least 90% identical, at least 92% identical, at least 94% identical, at least 96% identical, at least 98% identical, at least 99% identical, or 100% identical) to:

(SEQ ID NO: 171)
TACTTCGGCAAACTGGAATCCAAGCTGAGCGTGATCCGGAATTTAAACGA
CCAAGTTCTGTTTATCGATCAAGGTAACCGGCCTCTGTTCGAGGACATGA
CCGACTCCGATTGCCGGGACAATGCCCCCCGGACCATCTTCATTATCTCC
ATGTACAAGGACAGCCAGCCCCGGGGCATGGCTGTGACAATTAGCGTGAA
GTGTGAGAAAATCAGCACTTTATCTTGTGAGAACAAGATCATCTCCTTTA
AGGAAATGAACCCCCCCGATAACATCAAGGACACCAAGTCCGATATCATC
TTCTTCCAGCGGTCCGTGCCCGGTCACGATAACAAGATGCAGTTCGAATC
CTCCTCCTACGAGGGCTACTTTTTAGCTTGTGAAAAGGAGAGGGATTTAT
TCAAGCTGATCCTCAAGAAGGAGGACGAGCTGGGCGATCGTTCCATCATG
TTCACCGTCCAAAACGAGGAT.

[0584] In some embodiments of these multi-chain chimeric polypeptides, the second target-binding domain includes a soluble IL-12 (e.g., a soluble human IL-12). In some embodiments of these multi-chain chimeric polypeptides, the soluble human IL-15 includes a sequence of soluble human IL-12β (p40) and a sequence of soluble human IL-12a (p35). In some embodiments of these multi-chain chimeric polypeptides, the soluble

[0585] IL-15 human IL-15 further includes a linker sequence (e.g., any of the exemplary linker sequences described herein) between the sequence of soluble IL-12β (p40) and the sequence of soluble human IL-12α (p35). In some examples of these multi-chain chimeric polypeptides, the linker sequence comprises GGGGSGGGGSGGGGS (SEQ ID NO: 102).

[0586] In some embodiments of these multi-chain chimeric polypeptides, the sequence of soluble human IL-12β (p40) comprises a sequence that is at least 80% identical (e.g., at least 82% identical, at least 84% identical, at least 86% identical, at least 88% identical, at least 90% identical, at least 92% identical, at least 94% identical, at least 96% identical, at least 98% identical, at least 99% identical, or 100% identical) to:

(SEQ ID NO: 81)
IWELKKDVYVVELDWYPDAPGEMVVLTCDTPEEDGITWTLDQSSEVLGSG
KTLTIQVKEFGDAGQYTCHKGGEVLSHSLLLLHKKEDGIWSTDILKDQKE
PKNKTFLRCEAKNYSGRFTCWWLTTISTDLTFSVKSSRGSSDPQGVTCGA
ATLSAERVRGDNKEYEYSVECQEDSACPAAEESLPIEVMVDAVHKLKYEN
YTSSFFIRDIIKPDPPKNLQLKPLKNSRQVEVSWEYPDTWSTPHSYFSLT
FCVQVQGKSKREKKDRVFTDKTSATVICRKNASISVRAQDRYYSSSWSEW
ASVPCS.

[0587] In some embodiments of these multi-chain chimeric polypeptides, the soluble human IL-12β (p40) is encoded by a sequence that is at least 80% identical (e.g., at least 82% identical, at least 84% identical, at least 86% identical, at least 88% identical, at least 90% identical, at least 92% identical, at least 94% identical, at least 96% identical, at least 98% identical, at least 99% identical, or 100% identical) to:

(SEQ ID NO: 172)
ATTTGGGAACTGAAGAAGGACGTCTACGTGGTCGAACTGGACTGGTATCC
CGATGCTCCCGGCGAAATGGTGGTGCTCACTTGTGACACCCCCGAAGAAG
ACGGCATCACTTGGACCCTCGATCAGAGCAGCGAGGTGCTGGGCTCCGGA
AAGACCCTCACAATCCAAGTTAAGGAGTTCGGAGACGCTGGCCAATACAC
ATGCCACAAGGGAGGCGAGGTGCTCAGCCATTCCTTATTATTATTACACA
AGAAGGAAGACGGAATCTGGTCCACCGACATTTTAAAAGATCAGAAGGAG
CCCAAGAATAAGACCTTTTTAAGGTGTGAGGCCAAAAACTACAGCGGTCG
TTTCACTTGTTGGTGGCTGACCACCATTTCCACCGATTTAACCTTCTCCG
TGAAAAGCAGCCGGGGAAGCTCCGACCCTCAAGGTGTGACATGTGGAGCC
GCTACCCTCAGCGCTGAGAGGGTTCGTGGCGATAACAAGGAATACGAGTA
CAGCGTGGAGTGCCAAGAAGATAGCGCTTGTCCCGCTGCCGAAGAATCTT
TACCCATTGAGGTGATGGTGGACGCCGTGCACAAACTCAAGTACGAGAAC
TACACCTCCTCCTTCTTTATCCGGGACATCATTAAGCCCGATCCTCCTAA
GAATTTACAGCTGAAGCCTCTCAAAAATAGCCGGCAAGTTGAGGTCTCTT
GGGAATATCCCGACACTTGGAGCACACCCCACAGCTACTTCTCTTTAACC
TTTTGTGTGCAAGTTCAAGGTAAAAGCAAGCGGGAGAAGAAAGACCGGGT
GTTTACCGACAAAACCAGCGCCACCGTCATCTGTCGGAAGAACGCCTCCA
TCAGCGTGAGGGCTCAAGATCGTTATTACTCCAGCAGCTGGTCCGAGTGG
GCCAGCGTGCCTTGTTCC.

[0588] In some embodiments of these multi-chain chimeric polypeptides, the soluble human IL-12α (p35) includes a sequence that is at least 80% identical (e.g., at least 82% identical, at least 84% identical, at least 86% identical, at least 88% identical, at least 90% identical, at least 92% identical, at least 94% identical, at least 96% identical, at least 98% identical, at least 99% identical, or 100% identical) to:

(SEQ ID NO: 80)
RNLPVATPDPGMFPCLHHSQNLLRAVSNMLQKARQTLEFYPCTSEEIDHED
ITKDKTSTVEACLPLELTKNESCLNSRETSFITNGSCLASRKTSFMMALCL
SSIYEDLKMYQVEFKTMNAKLLMDPKRQIFLDQNMLAVIDELMQALNFNSE
TVPQKSSLEEPDFYKTKIKLCILLHAFRIRAVTIDRVMSYLNAS.

[0589] In some embodiments of these multi-chain chimeric polypeptides, the soluble human IL-12α (p35) is encoded by a sequence that is at least 80% identical (e.g., at least 82% identical, at least 84% identical, at least 86% identical, at least 88% identical, at least 90% identical, at least 92% identical, at least 94% identical, at least 96% identical, at least 98% identical, at least 99% identical, or 100% identical) to:

(SEQ ID NO: 173)
CGTAACCTCCCCGTGGCTACCCCCGATCCCGGAATGTTCCCTTGTTTACAC
CACAGCCAGAATTTACTGAGGGCCGTGAGCAACATGCTGCAGAAAGCTAGG
CAGACTTTAGAATTTTACCCTTGCACCAGCGAGGAGATCGACCATGAAGAT
ATCACCAAGGACAAGACATCCACCGTGGAGGCTTGTTTACCTCTGGAGCTG
ACAAAGAACGAGTCTTGTCTCAACTCTCGTGAAACCAGCTTCATCACAAAT
GGCTCTTGTTTAGCTTCCCGGAAGACCTCCTTTATGATGGCTTTATGCCTC
AGCTCCATCTACGAGGATTTAAAGATGTACCAAGTGGAGTTCAAGACCATG
AACGCCAAGCTGCTCATGGACCCTAAACGGCAGATCTTTTTAGACCAGAAC
ATGCTGGCTGTGATTGATGAGCTGATGCAAGCTTTAAACTTCAACTCCGAG
ACCGTCCCTCAGAAGTCCTCCCTCGAGGAGCCCGATTTTTACAAGACAAAG
ATCAAACTGTGCATTTTACTCCACGCCTTTAGGATCCGGGCCGTGACCATT
GACCGGGTCATGAGCTATTTAAACGCCAGC.

[0590] In some embodiments, the first chimeric polypeptide can include a sequence that is at least 80% identical (e.g., at least 82% identical, at least 84% identical, at least 86% identical, at least 88% identical, at least 90% identical, at least 92% identical, at least 94% identical, at least 96% identical, at least 98% identical, at least 99% identical, or 100% identical) to:

(SEQ ID NO: 174)
YFGKLESKLSVIRNLNDQVLFIDQGNRPLFEDMTDSDCRDNAPRTIFIISM
YKDSQPRGMAVTISVKCEKISTLSCENKIISFKEMNPPDNIKDTKSDIIFF
QRSVPGHDNKMQFESSSYEGYFLACEKERDLFKLILKKEDELGDRSIMFTV
QNEDSGTTNTVAAYNLTWKSTNFKTILEWEPKPVNQVYTVQISTKSGDWKS
KCFYTTDTECDLTDEIVKDVKQTYLARVFSYPAGNVESTGSAGEPLYENSP
EFTPYLETNLGQPTIQSFEQVGTKVNVTVEDERTLVRRNNTFLSLRDVFGK
DLIYTLYYWKSSSSGKKTAKTNTNEFLIDVDKGENYCFSVQAVIPSRTVNR
KSTDSPVECMGQEKGEFRENWVNVISDLKKIEDLIQSMHIDATLYTESDVH
PSCKVTAMKCFLLELQVISLESGDASIHDTVENLIILANNSLSSNGNVTES
GCKECEELEEKNIKEFLQSFVHIVQMFINTS.

[0591] In some embodiments, a first chimeric polypeptide is encoded by a sequence that is at least 80% identical (e.g., at least 82% identical, at least 84% identical, at least 86% identical, at least 88% identical, at least 90% identical, at least 92% identical, at least 94% identical, at least 96% identical, at least 98% identical, at least 99% identical, or 100% identical) to:

(SEQ ID NO: 175)
TACTTCGGCAAACTGGAATCCAAGCTGAGCGTGATCCGGAATTTAAACGAC
CAAGTTCTGTTTATCGATCAAGGTAACCGGCCTCTGTTCGAGGACATGACC
GACTCCGATTGCCGGGACAATGCCCCCCGGACCATCTTCATTATCTCCATG
TACAAGGACAGCCAGCCCCGGGGCATGGCTGTGACAATTAGCGTGAAGTGT
GAGAAAATCAGCACTTTATCTTGTGAGAACAAGATCATCTCCTTTAAGGAA
ATGAACCCCCCCGATAACATCAAGGACACCAAGTCCGATATCATCTTCTTC
CAGCGGTCCGTGCCCGGTCACGATAACAAGATGCAGTTCGAATCCTCCTCC
TACGAGGGCTACTTTTTAGCTTGTGAAAAGGAGAGGGATTTATTCAAGCTG
ATCCTCAAGAAGGAGGACGAGCTGGGCGATCGTTCCATCATGTTCACCGTC
CAAAACGAGGATAGCGGCACAACCAACACAGTCGCTGCCTATAACCTCACT
TGGAAGAGCACCAACTTCAAAACCATCCTCGAATGGGAACCCAAACCCGTT
AACCAAGTTTACACCGTGCAGATCAGCACCAAGTCCGGCGACTGGAAGTCC
AAATGTTTCTATACCACCGACACCGAGTGCGATCTCACCGATGAGATCGTG
AAAGATGTGAAACAGACCTACCTCGCCCGGGTGTTTAGCTACCCCGCCGGC
AATGTGGAGAGCACTGGTTCCGCTGGCGAGCCTTTATACGAGAACAGCCCC
GAATTTACCCCTTACCTCGAGACCAATTTAGGACAGCCCACCATCCAAAGC
TTTGAGCAAGTTGGCACAAAGGTGAATGTGACAGTGGAGGACGAGCGGACT
TTAGTGCGGCGGAACAACACCTTTCTCAGCCTCCGGGATGTGTTCGGCAAA
GATTTAATCTACACACTGTATTACTGGAAGTCCTCTTCCTCCGGCAAGAAG
ACAGCTAAAACCAACACAAACGAGTTTTTAATCGACGTGGATAAAGGCGAA
AACTACTGTTTCAGCGTGCAAGCTGTGATCCCCTCCCGGACCGTGAATAGG
AAAAGCACCGATAGCCCCGTTGAGTGCATGGGCCAAGAAAAGGGCGAGTTC
CGGGAGAACTGGGTGAACGTCATCAGCGATTTAAAGAAGATCGAAGATTTA
ATTCAGTCCATGCATATCGACGCCACTTTATACACAGAATCCGACGTGCAC
CCCTCTTGTAAGGTGACCGCCATGAAATGTTTTTTACTGGAGCTGCAAGTT
ATCTCTTTAGAGAGCGGAGACGCTAGCATCCACGACACCGTGGAGAATTTA
ATCATTTTAGCCAATAACTCTTTATCCAGCAACGGCAACGTGACAGAGTCC
GGCTGCAAGGAGTGCGAAGAGCTGGAGGAGAAGAACATCAAGGAGTTTCTG
CAATCCTTTGTGCACATTGTCCAGATGTTCATCAATACCTCC.

[0592] In some embodiments, a first chimeric polypeptide can include a sequence that is at least 80% identical (e.g., at least 82% identical, at least 84% identical, at least 86% identical, at least 88% identical, at least 90% identical, at least 92% identical, at least 94% identical, at least 96% identical, at least 98% identical, at least 99% identical, or 100% identical) to:

(SEQ ID NO: 176)
MKWVTFISLLFLFSSAYSYFGKLESKLSVIRNLNDQVLFIDQGNRPLFEDM
TDSDCRDNAPRTIFIISMYKDSQPRGMAVTISVKCEKISTLSCENKIISFK
EMNPPDNIKDTKSDIIFFQRSVPGHDNKMQFESSSYEGYFLACEKERDLFK
LILKKEDELGDRSIMFTVQNEDSGTTNTVAAYNLTWKSTNFKTILEWEPKP
VNQVYTVQISTKSGDWKSKCFYTTDTECDLTDEIVKDVKQTYLARVFSYPA
GNVESTGSAGEPLYENSPEFTPYLETNLGQPTIQSFEQVGTKVNVTVEDER
TLVRRNNTFLSLRDVFGKDLIYTLYYWKSSSSGKKTAKTNTNEFLIDVDKG
ENYCFSVQAVIPSRTVNRKSTDSPVECMGQEKGEFRENWVNVISDLKKIED
LIQSMHIDATLYTESDVHPSCKVTAMKCFLLELQVISLESGDASIHDTVEN
LIILANNSLSSNGNVTESGCKECEELEEKNIKEFLQSFVHIVQMFINTS.

[0593] In some embodiments, a first chimeric polypeptide is encoded by a sequence that is at least 80% identical (e.g., at least 82% identical, at least 84% identical, at least 86% identical, at least 88% identical, at least 90% identical, at least 92% identical, at least 94% identical, at least 96% identical, at least 98% identical, at least 99% identical, or 100% identical) to:

(SEQ ID NO: 177)
ATGAAGTGGGTCACATTTATCTCTTTACTGTTCCTCTTCTCCAGCGCCTAC
AGCTACTTCGGCAAACTGGAATCCAAGCTGAGCGTGATCCGGAATTTAAAC
GACCAAGTTCTGTTTATCGATCAAGGTAACCGGCCTCTGTTCGAGGACATG
ACCGACTCCGATTGCCGGGACAATGCCCCCCGGACCATCTTCATTATCTCC
ATGTACAAGGACAGCCAGCCCCGGGGCATGGCTGTGACAATTAGCGTGAAG
TGTGAGAAAATCAGCACTTTATCTTGTGAGAACAAGATCATCTCCTTTAAG
GAAATGAACCCCCCCGATAACATCAAGGACACCAAGTCCGATATCATCTTC
TTCCAGCGGTCCGTGCCCGGTCACGATAACAAGATGCAGTTCGAATCCTCC
TCCTACGAGGGCTACTTTTTAGCTTGTGAAAAGGAGAGGGATTTATTCAAG
CTGATCCTCAAGAAGGAGGACGAGCTGGGCGATCGTTCCATCATGTTCACC
GTCCAAAACGAGGATAGCGGCACAACCAACACAGTCGCTGCCTATAACCTC
ACTTGGAAGAGCACCAACTTCAAAACCATCCTCGAATGGGAACCCAAACCC
GTTAACCAAGTTTACACCGTGCAGATCAGCACCAAGTCCGGCGACTGGAAG
TCCAAATGTTTCTATACCACCGACACCGAGTGCGATCTCACCGATGAGATC
GTGAAAGATGTGAAACAGACCTACCTCGCCCGGGTGTTTAGCTACCCCGCC
GGCAATGTGGAGAGCACTGGTTCCGCTGGCGAGCCTTTATACGAGAACAGC
CCCGAATTTACCCCTTACCTCGAGACCAATTTAGGACAGCCCACCATCCAA
AGCTTTGAGCAAGTTGGCACAAAGGTGAATGTGACAGTGGAGGACGAGCGG
ACTTTAGTGCGGCGGAACAACACCTTTCTCAGCCTCCGGGATGTGTTCGGC
AAAGATTTAATCTACACACTGTATTACTGGAAGTCCTCTTCCTCCGGCAAG
AAGACAGCTAAAACCAACACAAACGAGTTTTTAATCGACGTGGATAAAGGC
GAAAACTACTGTTTCAGCGTGCAAGCTGTGATCCCCTCCCGGACCGTGAAT
AGGAAAAGCACCGATAGCCCCGTTGAGTGCATGGGCCAAGAAAAGGGCGAG
TTCCGGGAGAACTGGGTGAACGTCATCAGCGATTTAAAGAAGATCGAAGAT
TTAATTCAGTCCATGCATATCGACGCCACTTTATACACAGAATCCGACGTG
CACCCCTCTTGTAAGGTGACCGCCATGAAATGTTTTTTACTGGAGCTGCAA
GTTATCTCTTTAGAGAGCGGAGACGCTAGCATCCACGACACCGTGGAGAAT
TTAATCATTTTAGCCAATAACTCTTTATCCAGCAACGGCAACGTGACAGAG
TCCGGCTGCAAGGAGTGCGAAGAGCTGGAGGAGAAGAACATCAAGGAGTTT
CTGCAATCCTTTGTGCACATTGTCCAGATGTTCATCAATACCTCC.

[0594] In some embodiments, the second chimeric polypeptide can include a sequence that is at least 80% identical (e.g., at least 82% identical, at least 84% identical, at least 86% identical, at least 88% identical, at least 90% identical, at least 92% identical, at least 94% identical, at least 96% identical, at least 98% identical, at least 99% identical, or 100% identical) to:

(SEQ ID NO: 178)
IWELKKDVYVVELDWYPDAPGEMVVLTCDTPEEDGITWTLDQSSEVLGSGK
TLTIQVKEFGDAGQYTCHKGGEVLSHSLLLLHKKEDGIWSTDILKDQKEPK
NKTFLRCEAKNYSGRFTCWWLTTISTDLTFSVKSSRGSSDPQGVTCGAATL
SAERVRGDNKEYEYSVECQEDSACPAAEESLPIEVMVDAVHKLKYENYTSS
FFIRDIIKPDPPKNLQLKPLKNSRQVEVSWEYPDTWSTPHSYFSLTFCVQV
QGKSKREKKDRVFTDKTSATVICRKNASISVRAQDRYYSSSWSEWASVPCS
GGGGSGGGGSGGGGSRNLPVATPDPGMFPCLHEISQNLLRAVSNMLQKARQ
TLEFYPCTSEEIDHEDITKDKTSTVEACLPLELTKNESCLNSRETSFITNG
SCLASRKTSFMMALCLSSIYEDLKMYQVEFKTMNAKLLMDPKRQIFLDQNM
LAVIDELMQALNFNSETVPQKSSLEEPDFYKTKIKLCILLHAFRIRAVTID
RVMSYLNASITCPPPMSVEHADIWVKSYSLYSRERYICNSGFKRKAGTSSL
TECVLNKATNVAHWTTPSLKCIR.

[0595] In some embodiments, a second chimeric polypeptide is encoded by a sequence that is at least 80% identical (e.g., at least 82% identical, at least 84% identical, at least 86% identical, at least 88% identical, at least 90% identical, at least 92% identical, at least 94% identical, at least 96% identical, at least 98% identical, at least 99% identical, or 100% identical) to:

(SEQ ID NO: 179)
ATTTGGGAACTGAAGAAGGACGTCTACGTGGTCGAACTGGACTGGTATCCC
GATGCTCCCGGCGAAATGGTGGTGCTCACTTGTGACACCCCCGAAGAAGAC
GGCATCACTTGGACCCTCGATCAGAGCAGCGAGGTGCTGGGCTCCGGAAAG
ACCCTCACAATCCAAGTTAAGGAGTTCGGAGACGCTGGCCAATACACATGC
CACAAGGGAGGCGAGGTGCTCAGCCATTCCTTATTATTATTACACAAGAAG
GAAGACGGAATCTGGTCCACCGACATTTTAAAAGATCAGAAGGAGCCCAAG
AATAAGACCTTTTTAAGGTGTGAGGCCAAAAACTACAGCGGTCGTTTCACT
TGTTGGTGGCTGACCACCATTTCCACCGATTTAACCTTCTCCGTGAAAAGC
AGCCGGGGAAGCTCCGACCCTCAAGGTGTGACATGTGGAGCCGCTACCCTC
AGCGCTGAGAGGGTTCGTGGCGATAACAAGGAATACGAGTACAGCGTGGAG
TGCCAAGAAGATAGCGCTTGTCCCGCTGCCGAAGAATCTTTACCCATTGAG
GTGATGGTGGACGCCGTGCACAAACTCAAGTACGAGAACTACACCTCCTCC
TTCTTTATCCGGGACATCATTAAGCCCGATCCTCCTAAGAATTTACAGCTG
AAGCCTCTCAAAAATAGCCGGCAAGTTGAGGTCTCTTGGGAATATCCCGAC
ACTTGGAGCACACCCCACAGCTACTTCTCTTTAACCTTTTGTGTGCAAGTT
CAAGGTAAAAGCAAGCGGGAGAAGAAAGACCGGGTGTTTACCGACAAAACC
AGCGCCACCGTCATCTGTCGGAAGAACGCCTCCATCAGCGTGAGGGCTCAA
GATCGTTATTACTCCAGCAGCTGGTCCGAGTGGGCCAGCGTGCCTTGTTCC
GGCGGTGGAGGATCCGGAGGAGGTGGCTCCGGCGGCGGAGGATCTCGTAAC
CTCCCCGTGGCTACCCCCGATCCCGGAATGTTCCCTTGTTTACACCACAGC
CAGAATTTACTGAGGGCCGTGAGCAACATGCTGCAGAAAGCTAGGCAGACT
TTAGAATTTTACCCTTGCACCAGCGAGGAGATCGACCATGAAGATATCACC
AAGGACAAGACATCCACCGTGGAGGCTTGTTTACCTCTGGAGCTGACAAAG
AACGAGTCTTGTCTCAACTCTCGTGAAACCAGCTTCATCACAAATGGCTCT
TGTTTAGCTTCCCGGAAGACCTCCTTTATGATGGCTTTATGCCTCAGCTCC
ATCTACGAGGATTTAAAGATGTACCAAGTGGAGTTCAAGACCATGAACGCC
AAGCTGCTCATGGACCCTAAACGGCAGATCTTTTTAGACCAGAACATGCTG
GCTGTGATTGATGAGCTGATGCAAGCTTTAAACTTCAACTCCGAGACCGTC
CCTCAGAAGTCCTCCCTCGAGGAGCCCGATTTTTACAAGACAAAGATCAAA
CTGTGCATTTTACTCCACGCCTTTAGGATCCGGGCCGTGACCATTGACCGG
GTCATGAGCTATTTAAACGCCAGCATTACATGCCCCCCTCCCATGAGCGTG
GAGCACGCCGACATCTGGGTGAAGAGCTATAGCCTCTACAGCCGGGAGAGG
TATATCTGTAACAGCGGCTTCAAGAGGAAGGCCGGCACCAGCAGCCTCACC
GAGTGCGTGCTGAATAAGGCTACCAACGTGGCTCACTGGACAACACCCTCT
TTAAAGTGCATCCGG.

[0596] In some embodiments, a second chimeric polypeptide can include a sequence that is at least 80% identical (e.g., at least 82% identical, at least 84% identical, at least 86% identical, at least 88% identical, at least 90% identical, at least 92% identical, at least 94% identical, at least 96% identical, at least 98% identical, at least 99% identical, or 100% identical) to:

(SEQ ID NO: 180)
MKWVTFISLLFLFSSAYSIWELKKDVYVVELDWYPDAPGEMVVLTCDTPEE
DGITWTLDQSSEVLGSGKTLTIQVKEFGDAGQYTCHKGGEVLSHSLLLLHK
KEDGIWSTDILKDQKEPKNKTFLRCEAKNYSGRFTCWWLTTISTDLTFSVK
SSRGSSDPQGVTCGAATLSAERVRGDNKEYEYSVECQEDSACPAAEESLPI
EVMVDAVHKLKYENYTSSFFIRDIIKPDPPKNLQLKPLKNSRQVEVSWEYP
DTWSTPHSYFSLTFCVQVQGKSKREKKDRVFTDKTSATVICRKNASISVRA
QDRYYSSSWSEWASVPCSGGGGSGGGGSGGGGSRNLPVATPDPGMFPCLHH
SQNLLRAVSNMLQKARQTLEFYPCTSEEIDHEDITKDKTSTVEACLPLELT
KNESCLNSRETSFITNGSCLASRKTSFMMALCLSSIYEDLKMYQVEFKTMN
AKLLMDPKRQIFLDQNMLAVIDELMQALNFNSETVPQKSSLEEPDFYKTKI
KLCILLHAFRIRAVTIDRVMSYLNASITCPPPMSVEHADIWVKSYSLYSRE
RYICNSGFKRKAGTSSLTECVLNKATNVAHWTTPSLKCIR.

[0597] In some embodiments, a second chimeric polypeptide is encoded by a sequence that is at least 80% identical (e.g., at least 82% identical, at least 84% identical, at least 86% identical, at least 88% identical, at least 90% identical, at least 92% identical, at least 94% identical, at least 96% identical, at least 98% identical, at least 99% identical, or 100% identical) to:

(SEQ ID NO: 181)
ATGAAATGGGTGACCTTTATTTCTTTACTGTTCCTCTTTAGCAGCGCCTAC
TCCATTTGGGAACTGAAGAAGGACGTCTACGTGGTCGAACTGGACTGGTAT
CCCGATGCTCCCGGCGAAATGGTGGTGCTCACTTGTGACACCCCCGAAGAA
GACGGCATCACTTGGACCCTCGATCAGAGCAGCGAGGTGCTGGGCTCCGGA
AAGACCCTCACAATCCAAGTTAAGGAGTTCGGAGACGCTGGCCAATACACA
TGCCACAAGGGAGGCGAGGTGCTCAGCCATTCCTTATTATTATTACACAAG
AAGGAAGACGGAATCTGGTCCACCGACATTTTAAAAGATCAGAAGGAGCCC
AAGAATAAGACCTTTTTAAGGTGTGAGGCCAAAAACTACAGCGGTCGTTTC
ACTTGTTGGTGGCTGACCACCATTTCCACCGATTTAACCTTCTCCGTGAAA
AGCAGCCGGGGAAGCTCCGACCCTCAAGGTGTGACATGTGGAGCCGCTACC
CTCAGCGCTGAGAGGGTTCGTGGCGATAACAAGGAATACGAGTACAGCGTG
GAGTGCCAAGAAGATAGCGCTTGTCCCGCTGCCGAAGAATCTTTACCCATT
GAGGTGATGGTGGACGCCGTGCACAAACTCAAGTACGAGAACTACACCTCC
TCCTTCTTTATCCGGGACATCATTAAGCCCGATCCTCCTAAGAATTTACAG
CTGAAGCCTCTCAAAAATAGCCGGCAAGTTGAGGTCTCTTGGGAATATCCC
GACACTTGGAGCACACCCCACAGCTACTTCTCTTTAACCTTTTGTGTGCAA
GTTCAAGGTAAAAGCAAGCGGGAGAAGAAAGACCGGGTGTTTACCGACAAA
ACCAGCGCCACCGTCATCTGTCGGAAGAACGCCTCCATCAGCGTGAGGGCT
CAAGATCGTTATTACTCCAGCAGCTGGTCCGAGTGGGCCAGCGTGCCTTGT
TCCGGCGGTGGAGGATCCGGAGGAGGTGGCTCCGGCGGCGGAGGATCTCGT
AACCTCCCCGTGGCTACCCCCGATCCCGGAATGTTCCCTTGTTTACACCAC
AGCCAGAATTTACTGAGGGCCGTGAGCAACATGCTGCAGAAAGCTAGGCAG
ACTTTAGAATTTTACCCTTGCACCAGCGAGGAGATCGACCATGAAGATATC
ACCAAGGACAAGACATCCACCGTGGAGGCTTGTTTACCTCTGGAGCTGACA
AAGAACGAGTCTTGTCTCAACTCTCGTGAAACCAGCTTCATCACAAATGGC
TCTTGTTTAGCTTCCCGGAAGACCTCCTTTATGATGGCTTTATGCCTCAGC
TCCATCTACGAGGATTTAAAGATGTACCAAGTGGAGTTCAAGACCATGAAC
GCCAAGCTGCTCATGGACCCTAAACGGCAGATCTTTTTAGACCAGAACATG
CTGGCTGTGATTGATGAGCTGATGCAAGCTTTAAACTTCAACTCCGAGACC
GTCCCTCAGAAGTCCTCCCTCGAGGAGCCCGATTTTTACAAGACAAAGATC
AAACTGTGCATTTTACTCCACGCCTTTAGGATCCGGGCCGTGACCATTGAC
CGGGTCATGAGCTATTTAAACGCCAGCATTACATGCCCCCCTCCCATGAGC
GTGGAGCACGCCGACATCTGGGTGAAGAGCTATAGCCTCTACAGCCGGGAG
AGGTATATCTGTAACAGCGGCTTCAAGAGGAAGGCCGGCACCAGCAGCCTC
ACCGAGTGCGTGCTGAATAAGGCTACCAACGTGGCTCACTGGACAACACCC
TCTTTAAAGTGCATCCGG.

### Multi-Chain Chimeric Polypeptides—Type B

[0598] In some embodiments of any of the multi-chain chimeric polypeptides described herein, the first target-binding domain and the second targeting-binding domain each independently bind specifically to a receptor of IL-21 or to TGF-β. In some examples of these multi-chain chimeric polypeptides, the first target-binding domain and the soluble tissue factor domain directly abut each other in the first chimeric polypeptide. In some examples of these multi-chain chimeric polypeptides, the first chimeric polypeptide further comprises a linker sequence (e.g., any of the exemplary linkers described herein) between the first target-binding domain and the soluble tissue factor domain in the first chimeric polypeptide.

[0599] In some embodiments of these multi-chain chimeric polypeptides, the soluble tissue factor domain and the first domain of the pair of affinity domains directly abut each other in the first chimeric polypeptide. In some embodiments of these multi-chain chimeric polypeptides, the first chimeric polypeptide further includes a linker sequence (e.g., any of the exemplary linkers described herein) between the soluble tissue factor domain and the first domain of the pair of affinity domains in the first chimeric polypeptide.

[0600] In some embodiments of these multi-chain chimeric polypeptides, the second domain of the pair of affinity domains and the second target-binding domain directly abut each other in the second chimeric polypeptide. In some embodiments of these multi-chain chimeric polypeptides, the second chimeric polypeptide further includes a linker sequence (e.g., any of the exemplary linkers described herein) between the second domain of the pair of affinity domains and the second target-binding domain in the second chimeric polypeptide.

[0601] In some embodiments of these multi-chain chimeric polypeptides, the soluble tissue factor domain can be any of the exemplary soluble tissue factor domains described herein. In some embodiments of these multi-chain chimeric polypeptides, the pair of affinity domains can be any of the exemplary pairs of affinity domains described herein.

[0602] In some embodiments of these multi-chain chimeric polypeptides, one or both of the first target-binding domain and the second target-binding domain is a soluble IL-21 (e.g., a soluble human IL-21 polypeptide) or a soluble TGF-β receptor (e.g., a soluble TGFRβRII receptor). In some embodiments of these multi-chain chimeric polypeptides, the first target-binding domain and the second target-binding domain are each independently a soluble IL-21 or a soluble TGF-β receptor (e.g., a soluble TGFRβRII receptor). In some embodiments of these multi-chain chimeric polypeptides, the first target-binding domain and the second target-binding domain both bind specifically to a receptor of IL-21 or to TGF-β. In some embodiments of these multi-chain chimeric polypeptides, the first target-binding domain and the second target-binding domain bind specifically to the same epitope. In some embodiments of these multi-chain chimeric polypeptides, the first target-binding domain and the second target-binding domain include the same amino acid sequence.

[0603] In some embodiments of these multi-chain chimeric polypeptides, the first target-binding domain binds specifically to a receptor for IL-21, and the second target-binding domain binds specifically to TGF-β. In some embodiments of these multi-chain chimeric polypeptides, the first target-binding domain binds specifically to TGF-β, and the second target-binding domain bind specifically to a receptor for IL-21.

[0604] In some embodiments of these multi-chain chimeric polypeptides, the first target-binding domain includes a soluble IL-21 (e.g., a soluble human IL-21). In some embodiments of these multi-chain chimeric polypeptides, the soluble human IL-21 includes a sequence that is at least 80% identical (e.g., at least 82% identical, at least 84% identical, at least 86% identical, at least 88% identical, at least 90% identical, at least 92% identical, at least 94% identical, at least 96% identical, at least 98% identical, at least 99% identical, or 100% identical) to:

(SEQ ID NO: 83)
[sequence omitted]

[0605] In some embodiments of these multi-chain chimeric polypeptides, the soluble human IL-21 is encoded by a sequence that is at least 80% identical (e.g., at least 82% identical, at least 84% identical, at least 86% identical, at least 88% identical, at least 90% identical, at least 92% identical, at least 94% identical, at least 96% identical, at least 98% identical, at least 99% identical, or 100% identical) to:

(SEQ ID NO: 182)
CAGGGCCAGGACAGGCACATGATCCGGATGAGGCAGCTCATCGACATCGTC
GACCAGCTGAAGAACTACGTGAACGACCTGGTGCCCGAGTTTCTGCCTGCC
CCCGAGGACGTGGAGACCAACTGCGAGTGGTCCGCCTTCTCCTGCTTTCAG
AAGGCCCAGCTGAAGTCCGCCAACACCGGCAACAACGAGCGGATCATCAAC
GTGAGCATCAAGAAGCTGAAGCGGAAGCCTCCCTCCACAAACGCCGGCAGG
AGGCAGAAGCACAGGCTGACCTGCCCCAGCTGTGACTCCTACGAGAAGAAG
CCCCCCAAGGAGTTCCTGGAGAGGTTCAAGTCCCTGCTGCAGAAGATGATC
CATCAGCACCTGTCCTCCAGGACCCACGGCTCCGAGGACTCC.

[0606] In some embodiments of these multi-chain chimeric polypeptides, the second target-binding domain includes a soluble TGF-β receptor (e.g., a soluble TGFRβRII receptor (e.g., a soluble human TGFRβRII receptor)). In some embodiments of these multi-chain chimeric polypeptides, the soluble human TGFRβRII includes a first sequence of soluble human TGFRβRII and a second sequence of soluble human TGFRβRII. In some embodiments of these multi-chain chimeric polypeptides, the soluble human TGFRβRII includes a linker disposed between the first sequence of soluble human TGFRβRII and the second sequence of soluble human TGFRβRII. In some examples of these multi-chain chimeric polypeptides, the linker includes the sequence GGGGSGGGGSGGGGS (SEQ ID NO: 102).

[0607] In some embodiments of these multi-chain chimeric polypeptides, the first sequence of soluble human TGFRβRII receptor comprises a sequence that is at least 80% identical (e.g., at least 82% identical, at least 84% identical, at least 86% identical, at least 88% identical, at least 90% identical, at least 92% identical, at least 94% identical, at least 96% identical, at least 98% identical, at least 99% identical, or 100% identical) to:

(SEQ ID NO: 183)
IPPHVQKSVNNDMIVTDNNGAVKFPQLCKFCDVRFSTCDNQKSCMSNCS
ITSICEKPQEVCVAVWRKNDENITLETVCHDPKLPYHDFILEDAASPKC
IMKEKKKPGETFFMCSCSSDECNDNIIFSEEYNTSNPD.

[0608] In some embodiments of these multi-chain chimeric polypeptides, the second sequence of soluble human TGFRβRII receptor comprises a sequence that is at least 80% identical (e.g., at least 82% identical, at least 84% identical, at least 86% identical, at least 88% identical, at least 90% identical, at least 92% identical, at least 94% identical, at least 96% identical, at least 98% identical, at least 99% identical, or 100% identical) to:

(SEQ ID NO: 184)
IPPHVQKSVNNDMIVTDNNGAVKFPQLCKFCDVRFSTCDNQKSCMSNCS
ITSICEKPQEVCVAVWRKNDENITLETVCHDPKLPYHDFILEDAASPKC
IMKEKKKPGETFFMCSCSSDECNDNIIFSEEYNTSNPD.

[0609] In some embodiments of these multi-chain chimeric polypeptides, the first sequence of soluble human TGFRβRII receptor is encoded by a sequence that is at least 80% identical (e.g., at least 82% identical, at least 84% identical, at least 86% identical, at least 88% identical, at least 90% identical, at least 92% identical, at least 94% identical, at least 96% identical, at least 98% identical, at least 99% identical, or 100% identical) to:

(SEQ ID NO: 185)
ATCCCCCCCCATGTGCAAAAGAGCGTGAACAACGATATGATCGTGACCG
ACAACAACGGCGCCGTGAAGTTTCCCCAGCTCTGCAAGTTCTGCGATGT
CAGGTTCAGCACCTGCGATAATCAGAAGTCCTGCATGTCCAACTGCACG
ATCACCTCCATCTGCGAGAAGCCCCAAGAAGTGTGCGTGGCCGTGTGGC
GGAAAAATGACGAGAACATCACCCTGGAGACCGTGTGTCACGACCCCAA
GCTCCCTTATCACGACTTCATTCTGGAGGACGCTGCCTCCCCCAAATGC
ATCATGAAGGAGAAGAAGAAGCCCGGAGAGACCTTCTTTATGTGTTCCT
GTAGCAGCGACGAGTGTAACGACAACATCATCTTCAGCGAAGAGTACAA
CACCAGCAACCCTGAT.

[0610] In some embodiments of these multi-chain chimeric polypeptides, the second sequence of soluble human TGFRβRII receptor is encoded by a sequence that is at least 80% identical (e.g., at least 82% identical, at least 84% identical, at least 86% identical, at least 88% identical, at least 90% identical, at least 92% identical, at least 94% identical, at least 96% identical, at least 98% identical, at least 99% identical, or 100% identical) to:

(SEQ ID NO: 186)
ATTCCTCCCCACGTGCAGAAGAGCGTGAATAATGACATGATCGTGACCG
ATAACAATGGCGCCGTGAAATTTCCCCAGCTGTGCAAATTCTGCGATGT
GAGGTTTTCCACCTGCGACAACCAGAAGTCCTGTATGAGCAACTGCACA
ATCACCTCCATCTGTGAGAAGCCTCAGGAGGTGTGCGTGGCTGTCTGGC
GGAAGAATGACGAGAATATCACCCTGGAAACCGTCTGCCACGATCCCAA
GCTGCCCTACCACGATTTCATCCTGGAAGACGCCGCCAGCCCTAAGTGC
ATCATGAAAGAGAAAAAGAAGCCTGGCGAGACCTTTTTCATGTGCTCCT
GCAGCAGCGACGAATGCAACGACAATATCATCTTTAGCGAGGAATACAA
TACCAGCAACCCCGAC.

[0611] In some embodiments of these multi-chain chimeric polypeptides, the soluble human TGFRβRII receptor is encoded by a sequence that is at least 80% identical (e.g., at least 82% identical, at least 84% identical, at least 86% identical, at least 88% identical, at least 90% identical, at least 92% identical, at least 94% identical, at least 96% identical, at least 98% identical, at least 99% identical, or 100% identical) to:

(SEQ ID NO: 187)
ATCCCCCCCCATGTGCAAAAGAGCGTGAACAACGATATGATCGTGACCG
ACAACAACGGCGCCGTGAAGTTTCCCCAGCTCTGCAAGTTCTGCGATGT
CAGGTTCAGCACCTGCGATAATCAGAAGTCCTGCATGTCCAACTGCACG
ATCACCTCCATCTGCGAGAAGCCCCAAGAAGTGTGCGTGGCCGTGTGGC
GGAAAAATGACGAGAACATCACCCTGGAGACCGTGTGTCACGACCCCAA
GCTCCCTTATCACGACTTCATTCTGGAGGACGCTGCCCCCCCAAATGCA
TCATGAAGGAGAAGAAGAAGCCCGGAGAGACCTTCTTTATGTGTTCCTG
TAGCAGCGACGAGTGTAACGACAACATCATCTTCAGCGAAGAGTACAAC
ACCAGCAACCCTGATGGAGGTGGCGGATCCGGAGGTGGAGGTTCTGGTG
GAGGTGGGAGTATTCCTCCCCACGTGCAGAAGAGCGTGAATAATGACAT
GATCGTGACCGATAACAATGGCGCCGTGAAATTTCCCCAGCTGTGCAAA
TTCTGCGATGTGAGGTTTTCCACCTGCGACAACCAGAAGTCCTGTATGA
GCAACTGCACAATCACCTCCATCTGTGAGAAGCCTCAGGAGGTGTGCGT
GGCTGTCTGGCGGAAGAATGACGAGAATATCACCCTGGAAACCGTCTGC
CACGATCCCAAGCTGCCCTACCACGATTTCATCCTGGAAGACGCCGCCA
GCCCTAAGTGCATCATGAAAGAGAAAAAGAAGCCTGGCGAGACCTTTTT
CATGTGCTCCTGCAGCAGCGACGAATGCAACGACAATATCATCTTTAGC
GAGGAATACAATACCAGCAACCCCGAC.

[0612] In some embodiments of these multi-chain chimeric polypeptides, the human TGFβRII receptor includes a sequence that is at least 80% identical (e.g., at least 82% identical, at least 84% identical, at least 86% identical, at least 88% identical, at least 90% identical, at least 92% identical, at least 94% identical, at least 96% identical, at least 98% identical, at least 99% identical, or 100% identical) to:

(SEQ ID NO: 188)
IPPHVQKSVNNDMIVTDNNGAVKFPQLCKFCDVRFSTCDNQKSCMSNCS
ITSICEKPQEVCVAVWRKNDENITLETVCHDPKLPYHDFILEDAASPKC
IMKEKKKPGETFFMCSCSSDECNDNIIFSEEYNTSNPDGGGGSGGGGSG
GGGSIPPHVQKSVNNDMIVTDNNGAVKFPQLCKFCDVRFSTCDNQKSCM
SNCSITSICEKPQEVCVAVWRKNDENITLETVCHDPKLPYHFILEDAAS
PKCIMKEKKKPGETFFMCSCSSDECNDNIIFSEEYNTSNPD.

[0613] In some embodiments, the first chimeric polypeptide can include a sequence that is at least 80% identical (e.g., at least 82% identical, at least 84% identical, at least 86% identical, at least 88% identical, at least 90% identical, at least 92% identical, at least 94% identical, at least 96% identical, at least 98% identical, at least 99% identical, or 100% identical) to:

(SEQ ID NO: 189)
QGQDRHMIRMRQLIDIVDQLKNYVNDLVPEFLPAPEDVETNCEWSAFSC
FQKAQLKSANTGNNERIINVSIKKLKRKPPSTNAGRRQKHRLTCPSCDS
YEKKPPKEFLERFKSLLQKMIHQHLSSRTHGSEDSSGTTNTVAAYNLTW
KSTNFKTILEWEPKPVNQVYTVQISTKSGDWKSKCFYTTDTECDLTDEI
VKDVKQTYLARVFSYPAGNVESTGSAGEPLYENSPEFTPYETNLGQPTI
QSFEQVGTKVNVTVEDERTLVRRNNTFLSLRDVFGKDLIYTLYYWKSSS
SGKKTAKTNTNEFLIDVDKGENYCFSVQAVIPSRTVNRKSTDSPVECMG
QEKGEFRENWVNVISDLKKIEDLIQSMHIDATLYTESDVHPSCKVTAMK
CFLLELQVISLESGDASIHDTVENLIILANNSLSSNGNVTESGCKECEE
LEEKNIKEFLQSFVHIVQMFINTS.

[0614] In some embodiments, a first chimeric polypeptide is encoded by a sequence that is at least 80% identical (e.g., at least 82% identical, at least 84% identical, at least 86% identical, at least 88% identical, at least 90% identical, at least 92% identical, at least 94% identical, at least 96% identical, at least 98% identical, at least 99% identical, or 100% identical) to:

(SEQ ID NO: 190)
CAGGGCCAGGACAGGCACATGATCCGGATGAGGCAGCTCATCGACATCG
TCGACCAGCTGAAGAACTACGTGAACGACCTGGTGCCCGAGTTTCTGCC
TGCCCCCGAGGACGTGGAGACCAACTGCGAGTGGTCCGCCTTCTCCTGC
TTTCAGAAGGCCCAGCTGAAGTCCGCCAACACCGGCAACAACGAGCGGA
TCATCAACGTGAGCATCAAGAAGCTGAAGCGGAAGCCTCCCTCCACAAA
CGCCGGCAGGAGGCAGAAGCACAGGCTGACCTGCCCCAGCTGTGACTCC
TACGAGAAGAAGCCCCCCAAGGAGTTCCTGGAGAGGTTCAAGTCCCTGC
TGCAGAAGATGATCCATCAGCACCTGTCCTCCAGGACCCACGGCTCCGA
GGACTCCTCCGGCACCACCAATACCGTGGCCGCTTATAACCTCACATGG
AAGAGCACCAACTTCAAGACAATTCTGGAATGGGAACCCAAGCCCGTCA
ATCAAGTTTACACCGTGCAGATCTCCACCAAATCCGGAGACTGGAAGAG
CAAGTGCTTCTACACAACAGACACCGAGTGTGATTTAACCGACGAAATC
GTCAAGGACGTCAAGCAAACCTATCTGGCTCGGGTCTTTTCCTACCCCG
CTGGCAATGTCGAGTCCACCGGCTCCGCTGGCGAGCCTCTCTACGAGAA
TTCCCCCGAATTCACCCCTTATTTAGAGACCAATTTAGGCCAGCCTACC
ATCCAGAGCTTCGAGCAAGTTGGCACCAAGGTGAACGTCACCGTCGAGG
ATGAAAGGACTTTAGTGCGGCGGAATAACACATTTTTATCCCTCCGGGA
TGTGTTCGGCAAAGACCTCATCTACACACTGTACTATTGGAAGTCCAGC
TCCTCCGGCAAAAAGACCGCTAAGACCAACACCAACGAGTTTTTAATTG
ACGTGGACAAAGGCGAGAACTACTGCTTCAGCGTGCAAGCCGTGATCCC
TTCTCGTACCGTCAACCGGAAGAGCACAGATTCCCCCGTTGAGTGCATG
GGCCAAGAAAAGGGCGAGTTCCGGGAGAACTGGGTGAACGTCATCAGCG
ATTTAAAGAAGATCGAAGATTTAATTCAGTCCATGCATATCGACGCCAC
TTTATACACAGAATCCGACGTGCACCCCTCTTGTAAGGTGACCGCCATG
AAATGTTTTTTACTGGAGCTGCAAGTTATCTCTTTAGAGAGCGGAGACG
CTAGCATCCACGACACCGTGGAGAATTTAATCATTTTAGCCAATAACTC
TTTATCCAGCAACGGCAACGTGACAGAGTCCGGCTGCAAGGAGTGCGAA
GAGCTGGAGGAGAAGAACATCAAGGAGTTTCTGCAATCCTTTGTGCACA
TTGTCCAGATGTTCATCAATACCTCC.

[0615] In some embodiments, a first chimeric polypeptide can include a sequence that is at least 80% identical (e.g., at least 82% identical, at least 84% identical, at least 86% identical, at least 88% identical, at least 90% identical, at least 92% identical, at least 94% identical, at least 96% identical, at least 98% identical, at least 99% identical, or 100% identical) to:

(SEQ ID NO: 191)
MKWVTFISLLFLFSSAYSQGQDRHMIRMRQLIDIVDQLKNYVNDLVPEF
LPAPEDVETNCEWSAFSCFQKAQLKSANTGNNERIINVSIKKLKRKPPS
TNAGRRQKHRLTCPSCDSYEKKPPKEFLERFKSLLQKMIHQHLSSRTHG
SEDSSGTTNTVAAYNLTWKSTNFKTILEWEPKPVNQVYTVQISTKSGDW
KSKCFYTTDTECDLTDEIVKDVKQTYLARVFSYPAGNVESTGSAGEPLY
ENSPEFTPYLETNLGQPTIQSFEQVGTKVNVTVEDERTLVRRNNTFLSL
RDVFGKDLIYTLYYWKSSSSGKKTAKTNTNEFLIDVDKGENYCFSVQAV
IPSRTVNRKSTDSPVECMGQEKGEFRENWVNVISDLKKIEDLIQSMHID
ATLYTESDVHPSCKVTAMKCFLLELQVISLESGDASIHDTVENLIILAN
NSLSSNGNVTESGCKECEELEEKNIKEFLQSFVHIVQMFINTS.

[0616] In some embodiments, a first chimeric polypeptide is encoded by a sequence that is at least 80% identical (e.g., at least 82% identical, at least 84% identical, at least 86% identical, at least 88% identical, at least 90% identical, at least 92% identical, at least 94% identical, at least 96% identical, at least 98% identical, at least 99% identical, or 100% identical) to:

(SEQ ID NO: 192)
ATGAAGTGGGTGACCTTCATCAGCCTGCTGTTCCTGTTCTCCAGCGCCT
ACTCCCAGGGCCAGGACAGGCACATGATCCGGATGAGGCAGCTCATCGA
CATCGTCGACCAGCTGAAGAACTACGTGAACGACCTGGTGCCCGAGTTT
CTGCCTGCCCCCGAGGACGTGGAGACCAACTGCGAGTGGTCCGCCTTCT
CCTGCTTTCAGAAGGCCCAGCTGAAGTCCGCCAACACCGGCAACAACGA
GCGGATCATCAACGTGAGCATCAAGAAGCTGAAGCGGAAGCCTCCCTCC
ACAAACGCCGGCAGGAGGCAGAAGCACAGGCTGACCTGCCCCAGCTGTG
ACTCCTACGAGAAGAAGCCCCCCAAGGAGTTCCTGGAGAGGTTCAAGTC
CCTGCTGCAGAAGATGATCCATCAGCACCTGTCCTCCAGGACCCACGGC
TCCGAGGACTCCTCCGGCACCACCAATACCGTGGCCGCTTATAACCTCA
CATGGAAGAGCACCAACTTCAAGACAATTCTGGAATGGGAACCCAAGCC
CGTCAATCAAGTTTACACCGTGCAGATCTCCACCAAATCCGGAGACTGG
AAGAGCAAGTGCTTCTACACAACAGACACCGAGTGTGATTTAACCGACG
AAATCGTCAAGGACGTCAAGCAAACCTATCTGGCTCGGGTCTTTTCCTA
CCCCGCTGGCAATGTCGAGTCCACCGGCTCCGCTGGCGAGCCTCTCTAC
GAGAATTCCCCCGAATTCACCCCTTATTTAGAGACCAATTTAGGCCAGC
CTACCATCCAGAGCTTCGAGCAAGTTGGCACCAAGGTGAACGTCACCGT
CGAGGATGAAAGGACTTTAGTGCGGCGGAATAACACATTTTTATCCCTC
CGGGATGTGTTCGGCAAAGACCTCATCTACACACTGTACTATTGGAAGT
CCAGCTCCTCCGGCAAAAAGACCGCTAAGACCAACACCAACGAGTTTTT
AATTGACGTGGACAAAGGCGAGAACTACTGCTTCAGCGTGCAAGCCGTG
ATCCCTTCTCGTACCGTCAACCGGAAGAGCACAGATTCCCCCGTTGAGT
GCATGGGCCAAGAAAAGGGCGAGTTCCGGGAGAACTGGGTGAACGTCAT
CAGCGATTTAAAGAAGATCGAAGATTTAATTCAGTCCATGCATATCGAC
GCCACTTTATACACAGAATCCGACGTGCACCCCTCTTGTAAGGTGACCG
CCATGAAATGTTTTTTACTGGAGCTGCAAGTTATCTCTTTAGAGAGCGG
AGACGCTAGCATCCACGACACCGTGGAGAATTTAATCATTTTAGCCAAT
AACTCTTTATCCAGCAACGGCAACGTGACAGAGTCCGGCTGCAAGGAGT
GCGAAGAGCTGGAGGAGAAGAACATCAAGGAGTTTCTGCAATCCTTTGT
GCACATTGTCCAGATGTTCATCAATACCTCC.

[0617] In some embodiments, the second chimeric polypeptide can include a sequence that is at least 80% identical (e.g., at least 82% identical, at least 84% identical, at least 86% identical, at least 88% identical, at least 90% identical, at least 92% identical, at least 94% identical, at least 96% identical, at least 98% identical, at least 99% identical, or 100% identical) to:

(SEQ ID NO: 193)
IPPHVQKSVNNDMIVTDNNGAVKFPQLCKFCDVRFSTCDNQKSCMSNCS
ITSICEKPQEVCVAVWRKNDENITLETVCHDPKLPYHDFILEDAASPKC
IMKEKKKPGETFFMCSCSSDECNDNIIFSEEYNTSNPDGGGGSGGGGSG
GGGSIPPHVQKSVNNDMIVTDNNGAVKFPQLCKFCDVRFSTCDNQKSCM
SNCSITSICEKPQEVCVAVWRKNDENITLETVCHDPKLPYHDFILEDAA
SPKCIMKEKKKPGETFFMCSCSSDECNDNIIFSEEYNTSNPDITCPPPM
SVEHADIWVKSYSLYSRERYICNSGFKRKAGTSSLTECVLNKATNVAHW
TTPSLKCIR.

[0618] In some embodiments, a second chimeric polypeptide is encoded by a sequence that is at least 80% identical (e.g., at least 82% identical, at least 84% identical, at least 86% identical, at least 88% identical, at least 90% identical, at least 92% identical, at least 94% identical, at least 96% identical, at least 98% identical, at least 99% identical, or 100% identical) to:

(SEQ ID NO: 194)
ATCCCCCCCCATGTGCAAAAGAGCGTGAACAACGATATGATCGTGACC
GACAACAACGGCGCCGTGAAGTTTCCCCAGCTCTGCAAGTTCTGCGAT
GTCAGGTTCAGCACCTGCGATAATCAGAAGTCCTGCATGTCCAACTGC
ACGATCACCTCCATCTGCGAGAAGCCCCAAGAAGTGTGCGTGGCCGTG
TGGCGGAAAAATGACGAGAACATCACCCTGGAGACCGTGTGTCACGAC
CCCAAGCTCCCTTATCACGACTTCATTCTGGAGGACGCTGCCTCCCCC
AAATGCATCATGAAGGAGAAGAAGAAGCCCGGAGAGACCTTCTTTATG
TGTTCCTGTAGCAGCGACGAGTGTAACGACAACATCATCTTCAGCGAA
GAGTACAACACCAGCAACCCTGATGGAGGTGGCGGATCCGGAGGTGGA
GGTTCTGGTGGAGGTGGGAGTATTCCTCCCCACGTGCAGAAGAGCGTG
AATAATGACATGATCGTGACCGATAACAATGGCGCCGTGAAATTTCCC
CAGCTGTGCAAATTCTGCGATGTGAGGTTTTCCACCTGCGACAACCAG
AAGTCCTGTATGAGCAACTGCACAATCACCTCCATCTGTGAGAAGCCT
CAGGAGGTGTGCGTGGCTGTCTGGCGGAAGAATGACGAGAATATCACC
CTGGAAACCGTCTGCCACGATCCCAAGCTGCCCTACCACGATTTCATC
CTGGAAGACGCCGCCAGCCCTAAGTGCATCATGAAAGAGAAAAAGAAG
CCTGGCGAGACCTTTTTCATGTGCTCCTGCAGCAGCGACGAATGCAAC
GACAATATCATCTTTAGCGAGGAATACAATACCAGCAACCCCGACATC
ACGTGTCCTCCTCCTATGTCCGTGGAACACGCAGACATCTGGGTCAAG
AGCTACAGCTTGTACTCCAGGGAGCGGTACATTTGTAACTCTGGTTTC
AAGCGTAAAGCCGGCACGTCCAGCCTGACGGAGTGCGTGTTGAACAAG
GCCACGAATGTCGCCCACTGGACAACCCCCAGTCTCAAATGTATTAGA.

[0619] In some embodiments, a second chimeric polypeptide can include a sequence that is at least 80% identical (e.g., at least 82% identical, at least 84% identical, at least 86% identical, at least 88% identical, at least 90% identical, at least 92% identical, at least 94% identical, at least 96% identical, at least 98% identical, at least 99% identical, or 100% identical) to:

(SEQ ID NO: 195)
MKWVTFISLLFLFSSAYSIPPHVQKSVNNDMIVTDNNGAVKFPQLCKFC
DVRFSTCDNQKSCMSNCSITSICEKPQEVCVAVWRKNDENITLETVCHD
PKLPYHDFILEDAASPKCIMKEKKKPGETFFMCSCSSDECNDNIIFSEE
YNTSNPDGGGGSGGGGSGGGGSIPPHVQKSVNNDMIVTDNNGAVKFPQL
CKFCDVRFSTCDNQKSCMSNCSITSICEKPQEVCVAVWRKNDENITLET
VCHDPKLPYHDFILEDAASPKCIMKEKKKPGETFFMCSCSSDECNDNII
FSEEYNTSNPDITCPPPMSVEHADIWVKSYSLYSRERYICNSGFKRKAG
TSSLTECVLNKATNVAHWTTPSLKCIR.

[0620] In some embodiments, a second chimeric polypeptide is encoded by a sequence that is at least 80% identical (e.g., at least 82% identical, at least 84% identical, at least 86% identical, at least 88% identical, at least 90% identical, at least 92% identical, at least 94% identical, at least 96% identical, at least 98% identical, at least 99% identical, or 100% identical) to:

(SEQ ID NO: 196)
ATGAAGTGGGTGACCTTCATCAGCCTGCTGTTCCTGTTCTCCAGCGCCT
ACTCCATCCCCCCCCATGTGCAAAAGAGCGTGAACAACGATATGATCGT
GACCGACAACAACGGCGCCGTGAAGTTTCCCCAGCTCTGCAAGTTCTGC
GATGTCAGGTTCAGCACCTGCGATAATCAGAAGTCCTGCATGTCCAACT
GCACGATCACCTCCATCTGCGAGAAGCCCCAAGAAGTGTGCGTGGCCGT
GTGGCGGAAAAATGACGAGAACATCACCCTGGAGACCGTGTGTCACGAC
CCCAAGCTCCCTTATCACGACTTCATTCTGGAGGACGCTGCCTCCCCCA
AATGCATCATGAAGGAGAAGAAGAAGCCCGGAGAGACCTTCTTTATGTG
TTCCTGTAGCAGCGACGAGTGTAACGACAACATCATCTTCAGCGAAGAG
TACAACACCAGCAACCCTGATGGAGGTGGCGGATCCGGAGGTGGAGGTT
CTGGTGGAGGTGGGAGTATTCCTCCCCACGTGCAGAAGAGCGTGAATAA
TGACATGATCGTGACCGATAACAATGGCGCCGTGAAATTTCCCCAGCTG
TGCAAATTCTGCGATGTGAGGTTTTCCACCTGCGACAACCAGAAGTCCT
GTATGAGCAACTGCACAATCACCTCCATCTGTGAGAAGCCTCAGGAGGT
GTGCGTGGCTGTCTGGCGGAAGAATGACGAGAATATCACCCTGGAAACC
GTCTGCCACGATCCCAAGCTGCCCTACCACGATTTCATCCTGGAAGACG
CCGCCAGCCCTAAGTGCATCATGAAAGAGAAAAAGAAGCCTGGCGAGAC
CTTTTTCATGTGCTCCTGCAGCAGCGACGAATGCAACGACAATATCATC
TTTAGCGAGGAATACAATACCAGCAACCCCGACATCACGTGTCCTCCTC
CTATGTCCGTGGAACACGCAGACATCTGGGTCAAGAGCTACAGCTTGTA
CTCCAGGGAGCGGTACATTTGTAACTCTGGTTTCAAGCGTAAAGCCGGC
ACGTCCAGCCTGACGGAGTGCGTGTTGAACAAGGCCACGAATGTCGCCC
ACTGGACAACCCCCAGTCTCAAATGTATTAGA

### Exemplary Multi-Chain Chimeric Polypeptides—Type C

[0621] In some embodiments of any of the multi-chain chimeric polypeptides described herein, the first target-binding domain and the second targeting-binding domain each independently bind specifically to a receptor of IL-7 or a receptor of IL-21. In some examples of these multi-chain chimeric polypeptides, the first target-binding domain and the soluble tissue factor domain directly abut each other in the first chimeric polypeptide. In some examples of these multi-chain chimeric polypeptides, the first chimeric polypeptide further comprises a linker sequence (e.g., any of the exemplary linkers described herein) between the first target-binding domain and the soluble tissue factor domain in the first chimeric polypeptide.

[0622] In some embodiments of these multi-chain chimeric polypeptides, the soluble tissue factor domain and the first domain of the pair of affinity domains directly abut each other in the first chimeric polypeptide. In some embodiments of these multi-chain chimeric polypeptides, the first chimeric polypeptide further includes a linker sequence (e.g., any of the exemplary linkers described herein) between the soluble tissue factor domain and the first domain of the pair of affinity domains in the first chimeric polypeptide.

[0623] In some embodiments of these multi-chain chimeric polypeptides, the second domain of the pair of affinity domains and the second target-binding domain directly abut each other in the second chimeric polypeptide. In some embodiments of these multi-chain chimeric polypeptides, the second chimeric polypeptide further includes a linker sequence (e.g., any of the exemplary linkers described herein) between the second domain of the pair of affinity domains and the second target-binding domain in the second chimeric polypeptide.

[0624] In some embodiments of these multi-chain chimeric polypeptides, the soluble tissue factor domain can be any of the exemplary soluble tissue factor domains described herein. In some embodiments of these multi-chain chimeric polypeptides, the pair of affinity domains can be any of the exemplary pairs of affinity domains described herein.

[0625] In some embodiments of these multi-chain chimeric polypeptides, one or both of the first target-binding domain and the second target-binding domain is a soluble IL-21 (e.g., a soluble human IL-21 polypeptide) or a soluble IL-7 (e.g., a soluble human IL-7 polypeptide). In some embodiments of these multi-chain chimeric polypeptides, the first target-binding domain and the second target-binding domain are each independently a soluble IL-21 or a soluble IL-7. In some embodiments of these multi-chain chimeric polypeptides, the first target-binding domain and the second target-binding domain both bind specifically to a receptor of IL-21 or a receptor of IL-7. In some embodiments of these multi-chain chimeric polypeptides, the first target-binding domain and the second target-binding domain bind specifically to the same epitope. In some embodiments of these multi-chain chimeric polypeptides, the first target-binding domain and the second target-binding domain include the same amino acid sequence.

[0626] In some embodiments of these multi-chain chimeric polypeptides, the first target-binding domain binds specifically to a receptor for IL-21, and the second target-binding domain binds specifically to a receptor for IL-7. In some embodiments of these multi-chain chimeric polypeptides, the first target-binding domain binds specifically to a receptor for IL-7, and the second target-binding domain binds specifically to a receptor for IL-21.

[0627] In some embodiments of these multi-chain chimeric polypeptides, the first target-binding domain includes a soluble IL-21 (e.g., a soluble human IL-21).

[0628] In some embodiments of these multi-chain chimeric polypeptides, the soluble human IL-21 includes a sequence that is at least 80% identical (e.g., at least 82% identical, at least 84% identical, at least 86% identical, at least 88% identical, at least 90% identical, at least 92% identical, at least 94% identical, at least 96% identical, at least 98% identical, at least 99% identical, or 100% identical) to:

(SEQ ID NO: 83)
[sequence omitted]

[0629] In some embodiments of these multi-chain chimeric polypeptides, the soluble human IL-21 is encoded by a sequence that is at least 80% identical (e.g., at least 82% identical, at least 84% identical, at least 86% identical, at least 88% identical, at least 90% identical, at least 92% identical, at least 94% identical, at least 96% identical, at least 98% identical, at least 99% identical, or 100% identical) to:

(SEQ ID NO: 197)
CAAGGTCAAGATCGCCACATGATTAGAATGCGTCAACTTATAGATAT
TGTTGATCAGCTGAAAAATTATGTGAATGACTTGGTCCCTGAATTTC
TGCCAGCTCCAGAAGATGTAGAGACAAACTGTGAGTGGTCAGCTTTT
TCCTGTTTTCAGAAGGCCCAACTAAAGTCAGCAAATACAGGAAACAA
TGAAAGGATAATCAATGTATCAATTAAAAAGCTGAAGAGGAAACCAC
CTTCCACAAATGCAGGGAGAAGACAGAAACACAGACTAACATGCCCT
TCATGTGATTCTTATGAGAAAAAACCACCCAAAGAATTCCTAGAAAG
ATTCAAATCACTTCTCCAAAAGATGATTCATCAGCATCTGTCCTCTA
GAACACACGGAAGTGAAGATTCC.

[0630] In some embodiments of these multi-chain chimeric polypeptides, the soluble human IL-21 is encoded by a sequence that is at least 80% identical (e.g., at least 82% identical, at least 84% identical, at least 86% identical, at least 88% identical, at least 90% identical, at least 92% identical, at least 94% identical, at least 96% identical, at least 98% identical, at least 99% identical, or 100% identical) to:

(SEQ ID NO: 182)
CAGGGCCAGGACAGGCACATGATCCGGATGAGGCAGCTCATCGA
CATCGTCGACCAGCTGAAGAACTACGTGAACGACCTGGTGCCCG
AGTTTCTGCCTGCCCCCGAGGACGTGGAGACCAACTGCGAGTGG
TCCGCCTTCTCCTGCTTTCAGAAGGCCCAGCTGAAGTCCGCCAA
CACCGGCAACAACGAGCGGATCATCAACGTGAGCATCAAGAAGC
TGAAGCGGAAGCCTCCCTCCACAAACGCCGGCAGGAGGCAGAAG
CACAGGCTGACCTGCCCCAGCTGTGACTCCTACGAGAAGAAGCC
CCCCAAGGAGTTCCTGGAGAGGTTCAAGTCCCTGCTGCAGAAGA
TGATCCATCAGCACCTGTCCTCCAGGACCCACGGCTCCGAGGAC
TCC.

[0631] In some embodiments of these multi-chain chimeric polypeptides, the sequence of soluble human IL-7 comprises a sequence that is at least 80% identical (e.g., at least 82% identical, at least 84% identical, at least 86% identical, at least 88% identical, at least 90% identical, at least 92% identical, at least 94% identical, at least 96% identical, at least 98% identical, at least 99% identical, or 100% identical) to:

(SEQ ID NO: 79)
DCDIEGKDGKQYESVLMVSIDQLLDSMKEIGSNCLNNEFNFFK
RHICDANKEGMFLFRAARKLRQFLKMNSTGDFDLHLLKVSEGT
TILLNCTGQVKGRKPAALGEAQPTKSLEENKSLKEQKKLNDLC
FLKRLLQEIKTCWNKILMGTKEH.

[0632] In some embodiments of these multi-chain chimeric polypeptides, the soluble human IL-7 is encoded by a sequence that is at least 80% identical (e.g., at least 82% identical, at least 84% identical, at least 86% identical, at least 88% identical, at least 90% identical, at least 92% identical, at least 94% identical, at least 96% identical, at least 98% identical, at least 99% identical, or 100% identical) to:

(SEQ ID NO: 198)
GATTGTGATATTGAAGGTAAAGATGGCAAACAATATGAGAGTGT
TCTAATGGTCAGCATCGATCAATTATTGGACAGCATGAAAGAAA
TTGGTAGCAATTGCCTGAATAATGAATTTAACTTTTTTAAAAGA
CATATCTGTGATGCTAATAAGGAAGGTATGTTTTTATTCCGTGC
TGCTCGCAAGTTGAGGCAATTTCTTAAAATGAATAGCACTGGTG
ATTTTGATCTCCACTTATTAAAAGTTTCAGAAGGCACAACAATA
CTGTTGAACTGCACTGGCCAGGTTAAAGGAAGAAAACCAGCTGC
CCTGGGTGAAGCCCAACCAACAAAGAGTTTGGAAGAAAATAAAT
CTTTAAAGGAACAGAAAAAACTGAATGACTTGTGTTTCCTAAAG
AGACTATTACAAGAGATAAAAACTTGTTGGAATAAAATTTTGAT
GGGCACTAAAGAACAC.

[0633] In some embodiments, the first chimeric polypeptide can include a sequence that is at least 80% identical (e.g., at least 82% identical, at least 84% identical, at least 86% identical, at least 88% identical, at least 90% identical, at least 92% identical, at least 94% identical, at least 96% identical, at least 98% identical, at least 99% identical, or 100% identical) to:

(SEQ ID NO: 199)
QGQDRHMIRMRQLIDIVDQLKNYVNDLVPEFLPAPEDVETNCE
WSAFSCFQKAQLKSANTGNNERIINVSIKKLKRKPPSTNAGRR
QKHRLTCPSCDSYEKKPPKEFLERFKSLLQKMIHQHLSSRTHG
SEDSSGTTNTVAAYNLTWKSTNFKTILEWEPKPVNQVYTVQIS
TKSGDWKSKCFYTTDTECDLTDEIVKDVKQTYLARVFSYPAGN
VESTESTGSAGEPLYENSPEFTPYLETNLGQPTIQSFEQVGTK
VNVTVEDERTLVRRNNTFLSLRDVFGKDLIYTLYYWKSSSSGK
KTAKTNTNEFLIDVDKGENYCFSVQAVIPSRTVNRKSTDSPVE
CMGQEKGEFRENWVNVISDLKKIEDLIQSMHIDATLYTESDVH
PSCKVTAMKCFLLELQVISLESGDASIHDTVENLIILLANNSL
SSNGNVTESGCKECEELEEKNIKEFLQSFVHIVQMFINTS.

[0634] In some embodiments, a first chimeric polypeptide is encoded by a sequence that is at least 80% identical (e.g., at least 82% identical, at least 84% identical, at least 86% identical, at least 88% identical, at least 90% identical, at least 92% identical, at least 94% identical, at least 96% identical, at least 98% identical, at least 99% identical, or 100% identical) to:

(SEQ ID NO: 200)
CAAGGTCAAGATCGCCACATGATTAGAATGCGTCAACTTATAGAT
ATTGTTGATCAGCTGAAAAATTATGTGAATGACTTGGTCCCTGAA
TTTCTGCCAGCTCCAGAAGATGTAGAGACAAACTGTGAGTGGTCA
GCTTTTTCCTGTTTTCAGAAGGCCCAACTAAAGTCAGCAAATACA
GGAAACAATGAAAGGATAATCAATGTATCAATTAAAAAGCTGAAG
AGGAAACCACCTTCCACAAATGCAGGGAGAAGACAGAAACACAGA
CTAACATGCCCTTCATGTGATTCTTATGAGAAAAAACCACCCAAA
GAATTCCTAGAAAGATTCAAATCACTTCTCCAAAAGATGATTCAT
CAGCATCTGTCCTCTAGAACACACGGAAGTGAAGATTCCTCAGGC
ACTACAAATACTGTGGCAGCATATAATTTAACTTGGAAATCAACT
AATTTCAAGACAATTTTGGAGTGGGAACCCAAACCCGTCAATCAA
GTCTACACTGTTCAAATAAGCACTAAGTCAGGAGATTGGAAAAGC
AAATGCTTTTACACAACAGACACAGAGTGTGACCTCACCGACGAG
ATTGTGAAGGATGTGAAGCAGACGTACTTGGCACGGGTCTTCTCC
TACCCGGCAGGGAATGTGGAGAGCACCGGTTCTGCTGGGGAGCCT
CTGTATGAGAACTCCCCAGAGTTCACACCTTACCTGGAGACAAAC
CTCGGACAGCCAACAATTCAGAGTTTTGAACAGGTGGGAACAAAA
GTGAATGTGACCGTAGAAGATGAACGGACTTTAGTCAGAAGGAAC
AACACTTTCCTAAGCCTCCGGGATGTTTTTGGCAAGGACTTAATT
TATACACTTTATTATTGGAAATCTTCAAGTTCAGGAAAGAAAACA
GCCAAAACAAACACTAATGAGTTTTTGATTGATGTGGATAAAGGA
GAAAACTACTGTTTCAGTGTTCAAGCAGTGATTCCCTCCCGAACA
GTTAACCGGAAGAGTACAGACAGCCCGGTAGAGTGTATGGGCCAG
GAGAAAGGGGAATTCAGAGAAAACTGGGTGAACGTCATCAGCGAT
TTAAAGAAGATCGAAGATTTAATTCAGTCCATGCATATCGACGCC
ACTTTATACACAGAATCCGACGTGCACCCCTCTTGTAAGGTGACC
GCCATGAAATGTTTTTTACTGGAGCTGCAAGTTATCTCTTTAGAG
AGCGGAGACGCTAGCATCCACGACACCGTGGAGAATTTAATCATT
TTAGCCAATAACTCTTTATCCAGCAACGGCAACGTGACAGAGTCC
GGCTGCAAGGAGTGCGAAGAGCTGGAGGAGAAGAACATCAAGGAG
TTTCTGCAATCCTTTGTGCACATTGTCCAGATGTTCATCAATACC
TCC.

[0635] In some embodiments, a first chimeric polypeptide can include a sequence that is at least 80% identical (e.g., at least 82% identical, at least 84% identical, at least 86% identical, at least 88% identical, at least 90% identical, at least 92% identical, at least 94% identical, at least 96% identical, at least 98% identical, at least 99% identical, or 100% identical) to:

(SEQ ID NO: 201)
MGVKVLFALICIAVAEAQGQDRHMIRMRQLIDIVDQLKNYVNDLVPE
FLPAPEDTVETNCEWSAFSCFQKAQLKSANTGNNERIINVSIKKLKR
KPPSTNAGRRQKHRLCPSCDSYEKKPPKEFLERFKSLLQKMIHQHLS
SRTHGSEDSSGTTNTVAAYNLTWKSTNFKTILEWEPKPVNQVYTVQI
STKSGDWKSKCFYTTDTECDLTDEIVKDVKVKQTYLARVFSYPAGNV
ESTGSAGEPLYENSPEFTPYLETNLGQPTIQSFEQVGTKVNVTVEDE
RTLVRRNNTFLSLRDVFGKDLIYTLYYWKSSSSGKKTAKTNTNEFLI
DVDKGENYCFSVQAVIPSRTVNRKSTDSPVECMGQEKGEFRENWVNV
ISDLKKIEDLIQSMHIDATLYTESDVHPSCKVTAMKCFLLELQVISL
ESGDASIHDTVENLIILANNSLSSNGNVTESGCKECEELEEKNIKEF
LQSFVHIVQMFINTS.

[0636] In some embodiments, a first chimeric polypeptide is encoded by a sequence that is at least 80% identical (e.g., at least 82% identical, at least 84% identical, at least 86% identical, at least 88% identical, at least 90% identical, at least 92% identical, at least 94% identical, at least 96% identical, at least 98% identical, at least 99% identical, or 100% identical) to:

(SEQ ID NO: 202)
ATGGGAGTGAAAGTTCTTTTTGCCCTTATTTGTATTGCTGTGGC
CGAGGCCCAAGGTCAAGATCGCCACATGATTAGAATGCGTCAACTTAT
AGATATTGTTGATCAGCTGAAAAATTATGTGAATGACTTGGTCCCTGA
ATTTCTGCCAGCTCCAGAAGATGTAGAGACAAACTGTGAGTGGTCAGC
TTTTTCCTGTTTTCAGAAGGCCCAACTAAAGTCAGCAAATACAGGAAA
CAATGAAAGGATAATCAATGTATCAATTAAAAAGCTGAAGAGGAAACC
ACCTTCCACAAATGCAGGGAGAAGACAGAAACACAGACTAACATGCCC
TTCATGTGATTCTTATGAGAAAAAACCACCCAAAGAATTCCTAGAAAG
ATTCAAATCACTTCTCCAAAAGATGATTCATCAGCATCTGTCCTCTAG
AACACACGGAAGTGAAGATTCCTCAGGCACTACAAATACTGTGGCAGC
ATATAATTTAACTTGGAAATCAACTAATTTCAAGACAATTTTGGAGTG
GGAACCCAAACCCGTCAATCAAGTCTACACTGTTCAAATAAGCACTAA
GTCAGGAGATTGGAAAAGCAAATGCTTTTACACAACAGACACAGAGTG
TGACCTCACCGACGAGATTGTGAAGGATGTGAAGCAGACGTACTTGGC
ACGGGTCTTCTCCTACCCGGCAGGGAATGTGGAGAGCACCGGTTCTGC
TGGGGAGCCTCTGTATGAGAACTCCCCAGAGTTCACACCTTACCTGGA
GACAAACCTCGGACAGCCAACAATTCAGAGTTTTGAACAGGTGGGAAC
AAAAGTGAATGTGACCGTAGAAGATGAACGGACTTTAGTCAGAAGGAA
CAACACTTTCCTAAGCCTCCGGGATGTTTTTGGCAAGGACTTAATTTA
TACACTTTATTATTGGAAATCTTCAAGTTCAGGAAAGAAAACAGCCAA
AACAAACACTAATGAGTTTTTGATTGATGTGGATAAAGGAGAAAACTA
CTGTTTCAGTGTTCAAGCAGTGATTCCCTCCCGAACAGTTAACCGGAA
GAGTACAGACAGCCCGGTAGAGTGTATGGGCCAGGAGAAAGGGGAATT
CAGAGAAAACTGGGTGAACGTCATCAGCGATTTAAAGAAGATCGAAGA
TTTAATTCAGTCCATGCATATCGACGCCACTTTATACACAGAATCCGA
CGTGCACCCCTCTTGTAAGGTGACCGCCATGAAATGTTTTTTACTGGA
GCTGCAAGTTATCTCTTTAGAGAGCGGAGACGCTAGCATCCACGACAC
CGTGGAGAATTTAATCATTTTAGCCAATAACTCTTTATCCAGCAACGG
CAACGTGACAGAGTCCGGCTGCAAGGAGTGCGAAGAGCTGGAGGAGAA
GAACATCAAGGAGTTTCTGCAATCCTTTGTGCACATTGTCCAGATGTT
CATCAATACCTCC

[0637] In some embodiments, the second chimeric polypeptide can include a sequence that is at least 80% identical (e.g., at least 82% identical, at least 84% identical, at least 86% identical, at least 88% identical, at least 90% identical, at least 92% identical, at least 94% identical, at least 96% identical, at least 98% identical, at least 99% identical, or 100% identical) to:

(SEQ ID NO: 203)
DCDIEGKDGKQYESVLMVSIDQLLDSMKEIGSNCLNNENFFKRHIC
DANKEGMFLFRAARKLRQFLKMNSTGDFDLHLLKVSEGTTILLNCT
GQVKGRKPAALGEAQPTKSLEENKSLKEQKKLNDLCFLKRLLQEIK
TCWNKILMGTKEHITCPPPMSVEHADIWVKSYSLYSRERYICNSGF
KRKAGTSSLTECVLNKATNVAHWTTPSLKCIR

[0638] In some embodiments, a second chimeric polypeptide is encoded by a sequence that is at least 80% identical (e.g., at least 82% identical, at least 84% identical, at least 86% identical, at least 88% identical, at least 90% identical, at least 92% identical, at least 94% identical, at least 96% identical, at least 98% identical, at least 99% identical, or 100% identical) to:

(SEQ ID NO: 204)
GATTGTGATATTGAAGGTAAAGATGGCAAACAATATGAGAGTGTTC
TAATGGTCAGCATCGATCAATTATTGGACAGCATGAAAGAAATTGG
TAGCAATTGCCTGAATAATGAATTTAACTTTTTTAAAAGACATATC
TGTGATGCTAATAAGGAAGGTATGTTTTTATTCCGTGCTGCTCGCA
AGTTGAGGCAATTTCTTAAAATGAATAGCACTGGTGATTTTGATCT
CCACTTATTAAAAGTTTCAGAAGGCACAACAATACTGTTGAACTGC
ACTGGCCAGGTTAAAGGAAGAAAACCAGCTGCCCTGGGTGAAGCCC
AACCAACAAAGAGTTTGGAAGAAAATAAATCTTTAAAGGAACAGAA
AAAACTGAATGACTTGTGTTTCCTAAAGAGACTATTACAAGAGATA
AAAACTTGTTGGAATAAAATTTTGATGGGCACTAAAGAACACATCA
CGTGCCCTCCCCCCATGTCCGTGGAACACGCAGACATCTGGGTCAA
GAGCTACAGCTTGTACTCCAGGGAGCGGTACATTTGTAACTCTGGT
TTCAAGCGTAAAGCCGGCACGTCCAGCCTGACGGAGTGCGTGTTGA
ACAAGGCCACGAATGTCGCCCACTGGACAACCCCCAGTCTCAAATG
CATTAGA.

[0639] In some embodiments, a second chimeric polypeptide can include a sequence that is at least 80% identical (e.g., at least 82% identical, at least 84% identical, at least 86% identical, at least 88% identical, at least 90% identical, at least 92% identical, at least 94% identical, at least 96% identical, at least 98% identical, at least 99% identical, or 100% identical) to:

(SEQ ID NO: 205)
MGVKVLFALICIAVAEADCDIEGKDGKQYESVLMVSIDQLLDSMKEIGS
NCLNNEFNFFKRHICDANKEGMFLFRAARKLRQFLKMNSTGDFDLHLLK
VSEGTTILLNCTGQVKGRKPAALGEAQPTKSLEENKSLKEQKKLNDLCF
LKRLLQEIKTCWNKILMGTKEHITCPPPMSVEHADIWVKSYSLYSRERY
ICNSGFKRKAGTSSLTECVLNKATNVAHWTTPSLKCIR.

[0640] In some embodiments, a second chimeric polypeptide is encoded by a sequence that is at least 80% identical (e.g., at least 82% identical, at least 84% identical, at least 86% identical, at least 88% identical, at least 90% identical, at least 92% identical, at least 94% identical, at least 96% identical, at least 98% identical, at least 99% identical, or 100% identical) to:

(SEQ ID NO: 206)
ATGGGAGTGAAAGTTCTTTTTGCCCTTATTTGTATTGCTGTGGCCGAG
GCCGATTGTGATATTGAAGGTAAAGATGGCAAACAATATGAGAGTGTT
CTAATGGTCAGCATCGATCAATTATTGGACAGCATGAAAGAAATTGGT
AGCAATTGCCTGAATAATGAATTTAACTTTTTTAAAAGACATATCTGT
GATGCTAATAAGGAAGGTATGTTTTTATTCCGTGCTGCTCGCAAGTTG
AGGCAATTTCTTAAAATGAATAGCACTGGTGATTTTGATCTCCACTTA
TTAAAAGTTTCAGAAGGCACAACAATACTGTTGAACTGCACTGGCCAG
GTTAAAGGAAGAAAACCAGCTGCCCTGGGTGAAGCCCAACCAACAAAG
AGTTTGGAAGAAAATAAATCTTTAAAGGAACAGAAAAAACTGAATGAC
TTGTGTTTCCTAAAGAGACTATTACAAGAGATAAAAACTTGTTGGAAT
AAAATTTTGATGGGCACTAAAGAACACATCACGTGCCCTCCCCCCATG
TCCGTGGAACACGCAGACATCTGGGTCAAGAGCTACAGCTTGTACTCC
AGGGAGCGGTACATTTGTAACTCTGGTTTCAAGCGTAAAGCCGGCACG
TCCAGCCTGACGGAGTGCGTGTTGAACAAGGCCACGAATGTCGCCCAC
TGGACAACCCCCAGTCTCAAATGCATTAGA.

### Exemplary Multi-Chain Chimeric Polypeptides—Type D

[0641] In some embodiments of any of the multi-chain chimeric polypeptides described herein, the first target-binding domain and the second targeting-binding domain each independently bind specifically to a receptor of IL-7 or a receptor of IL-21. In some examples of these multi-chain chimeric polypeptides, the first target-binding domain and the soluble tissue factor domain directly abut each other in the first chimeric polypeptide. In some examples of these multi-chain chimeric polypeptides, the first chimeric polypeptide further comprises a linker sequence (e.g., any of the exemplary linkers described herein) between the first target-binding domain and the soluble tissue factor domain in the first chimeric polypeptide.

[0642] In some embodiments of these multi-chain chimeric polypeptides, the soluble tissue factor domain and the first domain of the pair of affinity domains directly abut each other in the first chimeric polypeptide. In some embodiments of these multi-chain chimeric polypeptides, the first chimeric polypeptide further includes a linker sequence (e.g., any of the exemplary linkers described herein) between the soluble tissue factor domain and the first domain of the pair of affinity domains in the first chimeric polypeptide.

[0643] In some embodiments of these multi-chain chimeric polypeptides, the second domain of the pair of affinity domains and the second target-binding domain directly abut each other in the second chimeric polypeptide. In some embodiments of these multi-chain chimeric polypeptides, the second chimeric polypeptide further includes a linker sequence (e.g., any of the exemplary linkers described herein) between the second domain of the pair of affinity domains and the second target-binding domain in the second chimeric polypeptide.

[0644] In some embodiments of these multi-chain chimeric polypeptides, the soluble tissue factor domain can be any of the exemplary soluble tissue factor domains described herein. In some embodiments of these multi-chain chimeric polypeptides, the pair of affinity domains can be any of the exemplary pairs of affinity domains described herein.

[0645] In some embodiments of these multi-chain chimeric polypeptides, one or both of the first target-binding domain and the second target-binding domain is a soluble IL-21 (e.g., a soluble human IL-21 polypeptide) or a soluble IL-7 (e.g., a soluble human IL-7 polypeptide). In some embodiments of these multi-chain chimeric polypeptides, the first target-binding domain and the second target-binding domain are each independently a soluble IL-21 or a soluble IL-7. In some embodiments of these multi-chain chimeric polypeptides, the first target-binding domain and the second target-binding domain both bind specifically to a receptor of IL-21 or a receptor of IL-7. In some embodiments of these multi-chain chimeric polypeptides, the first target-binding domain and the second target-binding domain bind specifically to the same epitope. In some embodiments of these multi-chain chimeric polypeptides, the first target-binding domain and the second target-binding domain include the same amino acid sequence.

[0646] In some embodiments of these multi-chain chimeric polypeptides, the first target-binding domain binds specifically to a receptor for IL-21, and the second target-binding domain binds specifically to a receptor for IL-7. In some embodiments of these multi-chain chimeric polypeptides, the first target-binding domain binds specifically to a receptor for IL-7, and the second target-binding domain binds specifically to a receptor for IL-21.

[0647] In some embodiments of these multi-chain chimeric polypeptides, the soluble human IL-21 includes a sequence that is at least 80% identical (e.g., at least 82% identical, at least 84% identical, at least 86% identical, at least 88% identical, at least 90% identical, at least 92% identical, at least 94% identical, at least 96% identical, at least 98% identical, at least 99% identical, or 100% identical) to:

(SEQ ID NO: 83)
QGQDRHMIRMRQLIDIVDQLKNYVNDLVPEFLPAPEDVETNCEWSAFS
CLKSANTGNNERIINVSIKKLKRKPPSTNAGRRQKHRLTCPSCDSYEK
kPPKEFLERFKSLLQKMIHQHLSSRTHGSEDS.

[0648] In some embodiments of these multi-chain chimeric polypeptides, the soluble human IL-21 is encoded by a sequence that is at least 80% identical (e.g., at least 82% identical, at least 84% identical, at least 86% identical, at least 88% identical, at least 90% identical, at least 92% identical, at least 94% identical, at least 96% identical, at least 98% identical, at least 99% identical, or 100% identical) to:

(SEQ ID NO: 197)
CAAGGTCAAGATCGCCACATGATTAGAATGCGTCAACTTATAGATAT
TGTTGATCAGCTGAAAAATTATGTGAATGACTTGGTCCCTGAATTTC
TGCCAGCTCCAGAAGATGTAGAGACAAACTGTGAGTGGTCAGCTTTT
TCCTGTTTTCAGAAGGCCCAACTAAAGTCAGCAAATACAGGAAACAA
TGAAAGGATAATCAATGTATCAATTAAAAAGCTGAAGAGGAAACCAC
CTTCCACAAATGCAGGGAGAAGACAGAAACACAGACTAACATGCCCT
TCATGTGATTCTTATGAGAAAAAACCACCCAAAGAATTCCTAGAAAG
ATTCAAATCACTTCTCCAAAAGATGATTCATCAGCATCTGTCCTCTA
GAACACACGGAAGTGAAGATTCC.

[0649] In some embodiments of these multi-chain chimeric polypeptides, the soluble human IL-21 is encoded by a sequence that is at least 80% identical (e.g., at least 82% identical, at least 84% identical, at least 86% identical, at least 88% identical, at least 90% identical, at least 92% identical, at least 94% identical, at least 96% identical, at least 98% identical, at least 99% identical, or 100% identical) to:

(SEQ ID NO: 182)
CAGGGCCAGGACAGGCACATGATCCGGATGAGGCAGCTCATCGACAT
CGTCGACCAGCTGAAGAACTACGTGAACGACCTGGTGCCCGAGTTTCTGCC
TGCCCCCGAGGACGTGGAGACCAACTGCGAGTGGTCCGCCTTCTCCTGCTT
TCAGAAGGCCCAGCTGAAGTCCGCCAACACCGGCAACAACGAGCGGATCAT
CAACGTGAGCATCAAGAAGCTGAAGCGGAAGCCTCCCTCCACAAACGCCGG
CAGGAGGCAGAAGCACAGGCTGACCTGCCCCAGCTGTGACTCCTACGAGAA
GAAGCCCCCCAAGGAGTTCCTGGAGAGGTTCAAGTCCCTGCTGCAGAAGAT
GATCCATCAGCACCTGTCCTCCAGGACCCACGGCTCCGAGGACTCC.

[0650] In some embodiments of these multi-chain chimeric polypeptides, the sequence of soluble human IL-7 comprises a sequence that is at least 80% identical (e.g., at least 82% identical, at least 84% identical, at least 86% identical, at least 88% identical, at least 90% identical, at least 92% identical, at least 94% identical, at least 96% identical, at least 98% identical, at least 99% identical, or 100% identical) to:

(SEQ ID NO: 79)
DCDIEGKDGKQYESVLMVSIDQLLDSMKEIGSNCLNNEFNEFKRHICDA
NKEGMFLFRAARKLRQFLKMNSTGDFDLHLLKVSEGTTILLNCTGQVKG
RKPAALGEAQPTKSLEENKSLKEQKKLNDLCFLKRLLQEIKTCWNKILM
GTKEH.

[0651] In some embodiments of these multi-chain chimeric polypeptides, the soluble human IL-7 is encoded by a sequence that is at least 80% identical (e.g., at least 82% identical, at least 84% identical, at least 86% identical, at least 88% identical, at least 90% identical, at least 92% identical, at least 94% identical, at least 96% identical, at least 98% identical, at least 99% identical, or 100% identical) to:

(SEQ ID NO: 198)
GATTGTGATATTGAAGGTAAAGATGGCAAACAATATGAGAGTGTTCTAA
TGGTCAGCATCGATCAATTATTGGACAGCATGAAAGAAATTGGTAGCAA
TTGCCTGAATAATGAATTTAACTTTTTTAAAAGACATATCTGTGATGCT
AATAAGGAAGGTATGTTTTTATTCCGTGCTGCTCGCAAGTTGAGGCAAT
TTCTTAAAATGAATAGCACTGGTGATTTTGATCTCCACTTATTAAAAGT
TTCAGAAGGCACAACAATACTGTTGAACTGCACTGGCCAGGTTAAAGGA
AGAAAACCAGCTGCCCTGGGTGAAGCCCAACCAACAAAGAGTTTGGAAG
AAAATAAATCTTTAAAGGAACAGAAAAAACTGAATGACTTGTGTTTCCT
AAAGAGACTATTACAAGAGATAAAAACTTGTTGGAATAAAATTTTGATG
GGCACTAAAGAACAC.

[0652] In some embodiments, the first chimeric polypeptide can include a sequence that is at least 80% identical (e.g., at least 82% identical, at least 84% identical, at least 86% identical, at least 88% identical, at least 90% identical, at least 92% identical, at least 94% identical, at least 96% identical, at least 98% identical, at least 99% identical, or 100% identical) to:

(SEQ ID NO: 207)
DCDIEGKDGKQYESVLMVSIDQLLDSMKEIGSNCLNNEFNEFKRHICDA
NKEGMFLFRAARKLRQFLKMNSTGDFDLHLLKVSEGTTILLNCTGQVKG
RKPAALGEAQPTKSLEENKSLKEQKKLNDLCFLKRLLQEIKTCWNKILM
GTKEHSGTTNTVAAYNLTWKSTNFKTILEWEPKPVNQVYTVQISTKSGD
WKSKCFYTTDTECDLTDEIVKDVKQTYLARVFSYPAGNVESTGSAGEPL
YENSPEFTPYLETNLGQPTIQSFEQVGTKVNVTVEDERTLVRRNNTFLS
LRDVFGKDLIYTLYYWKSSSSGKKTAKTNTNEFLIDVDKGENYCFSVQA
VIPSRTVNRKSTDSPVECMGQEKGEFRENWVNVISDLKKIEDLIQSMHI
DATLYTESDVHPSCKVTAMKCFLLELQVISLESGDASIHDTVENLIILA
NNSLSSNGNVTESGCKECEELEEKNIKEFLQSFVHIVQMFINTS.

[0653] In some embodiments, a first chimeric polypeptide is encoded by a sequence that is at least 80% identical (e.g., at least 82% identical, at least 84% identical, at least 86% identical, at least 88% identical, at least 90% identical, at least 92% identical, at least 94% identical, at least 96% identical, at least 98% identical, at least 99% identical, or 100% identical) to:

(SEQ ID NO: 208)
GATTGCGACATCGAGGGCAAGGACGGCAAGCAGTACGAGAGCGTGCTGA
TGGTGTCCATCGACCAGCTGCTGGACAGCATGAAGGAGATCGGCTCCAA
CTGCCTCAACAACGAGTTCAACTTCTTCAAGCGGCACATCTGCGACGCC
AACAAGGAGGGCATGTTCCTGTTCAGGGCCGCCAGGAAACTGCGGCAGT
TCCTGAAGATGAACTCCACCGGCGACTTCGACCTGCACCTGCTGAAGGT
GTCCGAGGGCACCACCATCCTGCTGAACTGCACCGGACAGGTGAAGGGC
CGGAAACCTGCTGCTCTGGGAGAGGCCCAACCCACCAAGAGCCTGGAGG
AGAACAAGTCCCTGAAGGAGCAGAAGAAGCTGAACGACCTGTGCTTCCT
GAAGAGGCTGCTGCAGGAGATCAAGACCTGCTGGAACAAGATCCTGATG
GGCACCAAGGAGCATAGCGGCACAACCAACACAGTCGCTGCCTATAACC
TCACTTGGAAGAGCACCAACTTCAAAACCATCCTCGAATGGGAACCCAA
ACCCGTTAACCAAGTTTACACCGTGCAGATCAGCACCAAGTCCGGCGAC
TGGAAGTCCAAATGTTTCTATACCACCGACACCGAGTGCGATCTCACCG
ATGAGATCGTGAAAGATGTGAAACAGACCTACCTCGCCCGGGTGTTTAG
CTACCCCGCCGGCAATGTGGAGAGCACTGGTTCCGCTGGCGAGCCTTTA
TACGAGAACAGCCCCGAATTTACCCCTTACCTCGAGACCAATTTAGGAC
AGCCCACCATCCAAAGCTTTGAGCAAGTTGGCACAAAGGTGAATGTGAC
AGTGGAGGACGAGCGGACTTTAGTGCGGCGGAACAACACCTTTCTCAGC
CTCCGGGATGTGTTCGGCAAAGATTTAATCTACACACTGTATTACTGGA
AGTCCTCTTCCTCCGGCAAGAAGACAGCTAAAACCAACACAAACGAGTT
TTTAATCGACGTGGATAAAGGCGAAAACTACTGTTTCAGCGTGCAAGCT
GTGATCCCCTCCCGGACCGTGAATAGGAAAAGCACCGATAGCCCCGTTG
AGTGCATGGGCCAAGAAAAGGGCGAGTTCCGGGAGAACTGGGTGAACGT
CATCAGCGATTTAAAGAAGATCGAAGATTTAATTCAGTCCATGCATATC
GACGCCACTTTATACACAGAATCCGACGTGCACCCCTCTTGTAAGGTGA
CCGCCATGAAATGTTTTTTACTGGAGCTGCAAGTTATCTCTTTAGAGAG
CGGAGACGCTAGCATCCACGACACCGTGGAGAATTTAATCATTTTAGCC
AATAACTCTTTATCCAGCAACGGCAACGTGACAGAGTCCGGCTGCAAGG
AGTGCGAAGAGCTGGAGGAGAAGAACATCAAGGAGTTTCTGCAATCCTT
TGTGCACATTGTCCAGATGTTCATCAATACCTCC.

[0654] In some embodiments, a first chimeric polypeptide can include a sequence that is at least 80% identical (e.g., at least 82% identical, at least 84% identical, at least 86% identical, at least 88% identical, at least 90% identical, at least 92% identical, at least 94% identical, at least 96% identical, at least 98% identical, at least 99% identical, or 100% identical) to:

(SEQ ID NO: 209)
MKWVTFISLLFLFSSAYSDCDIEGKDGKQYESVLMVSIDQLLDSMKEIG
SNCLNNEFNFFKRHICDANKEGMFLFRAARKLRQFLKMNSTGDFDLHLL
KVSEGTTILLNCTGQVKGRKPAALGEAQPTKSLEENKSLKEQKKLNDLC
FLKRLLQEIKTCWNKILMGTKEHSGTTNTVAAYNLTWKSTNFKTILEWE
PKPVNQVYTVQISTKSGDWKSKCFYTTDTECDLTDEIVKDVKQTYLARV
FSYPAGNVESTGSAGEPLYENSPEFTPYLETNLGQPTIQSFEQVGTKVN
VTVEDERTLVRRNNTFLSLRDVFGKDLIYTLYYWKSSSSGKKTAKTNTN
EFLIDVDKGENYCFSVQAVIPSRTVNRKSTDSPVECMGQEKGEFRENWV
NVISDLKKIEDLIQSMHIDATLYTESDVHPSCKVTAMKCFLLELQVISL
ESGDASIHDTVENLIILANNSLSSNGNVTESGCKECEELEEKNIKEFLQ
SFVHIVQMFINTS.

[0655] In some embodiments, a first chimeric polypeptide is encoded by a sequence that is at least 80% identical (e.g., at least 82% identical, at least 84% identical, at least 86% identical, at least 88% identical, at least 90% identical, at least 92% identical, at least 94% identical, at least 96% identical, at least 98% identical, at least 99% identical, or 100% identical) to:

(SEQ ID NO: 210)
ATGAAGTGGGTGACCTTCATCAGCCTGCTGTTCCTGTTCTCCAGCGCCT
ACTCCGATTGCGACATCGAGGGCAAGGACGGCAAGCAGTACGAGAGCGT
GCTGATGGTGTCCATCGACCAGCTGCTGGACAGCATGAAGGAGATCGGC
TCCAACTGCCTCAACAACGAGTTCAACTTCTTCAAGCGGCACATCTGCG
ACGCCAACAAGGAGGGCATGTTCCTGTTCAGGGCCGCCAGGAAACTGCG
GCAGTTCCTGAAGATGAACTCCACCGGCGACTTCGACCTGCACCTGCTG
AAGGTGTCCGAGGGCACCACCATCCTGCTGAACTGCACCGGACAGGTGA
AGGGCCGGAAACCTGCTGCTCTGGGAGAGGCCCAACCCACCAAGAGCCT
GGAGGAGAACAAGTCCCTGAAGGAGCAGAAGAAGCTGAACGACCTGTGC
TTCCTGAAGAGGCTGCTGCAGGAGATCAAGACCTGCTGGAACAAGATCC
TGATGGGCACCAAGGAGCATAGCGGCACAACCAACACAGTCGCTGCCTA
TAACCTCACTTGGAAGAGCACCAACTTCAAAACCATCCTCGAATGGGAA
CCCAAACCCGTTAACCAAGTTTACACCGTGCAGATCAGCACCAAGTCCG
GCGACTGGAAGTCCAAATGTTTCTATACCACCGACACCGAGTGCGATCT
CACCGATGAGATCGTGAAAGATGTGAAACAGACCTACCTCGCCCGGGTG
TTTAGCTACCCCGCCGGCAATGTGGAGAGCACTGGTTCCGCTGGCGAGC
CTTTATACGAGAACAGCCCCGAATTTACCCCTTACCTCGAGACCAATTT
AGGACAGCCCACCATCCAAAGCTTTGAGCAAGTTGGCACAAAGGTGAAT
GTGACAGTGGAGGACGAGCGGACTTTAGTGCGGCGGAACAACACCTTTC
TCAGCCTCCGGGATGTGTTCGGCAAAGATTTAATCTACACACTGTATTA
CTGGAAGTCCTCTTCCTCCGGCAAGAAGACAGCTAAAACCAACACAAAC
GAGTTTTTAATCGACGTGGATAAAGGCGAAAACTACTGTTTCAGCGTGC
AAGCTGTGATCCCCTCCCGGACCGTGAATAGGAAAAGCACCGATAGCCC
CGTTGAGTGCATGGGCCAAGAAAAGGGCGAGTTCCGGGAGAACTGGGTG
AACGTCATCAGCGATTTAAAGAAGATCGAAGATTTAATTCAGTCCATGC
ATATCGACGCCACTTTATACACAGAATCCGACGTGCACCCCTCTTGTAA
GGTGACCGCCATGAAATGTTTTTTACTGGAGCTGCAAGTTATCTCTTTA
GAGAGCGGAGACGCTAGCATCCACGACACCGTGGAGAATTTAATCATTT
TAGCCAATAACTCTTTATCCAGCAACGGCAACGTGACAGAGTCCGGCTG
CAAGGAGTGCGAAGAGCTGGAGGAGAAGAACATCAAGGAGTTTCTGCAA
TCCTTTGTGCACATTGTCCAGATGTTCATCAATACCTCC.

[0656] In some embodiments, the second chimeric polypeptide can include a sequence that is at least 80% identical (e.g., at least 82% identical, at least 84% identical, at least 86% identical, at least 88% identical, at least 90% identical, at least 92% identical, at least 94% identical, at least 96% identical, at least 98% identical, at least 99% identical, or 100% identical) to:

(SEQ ID NO: 211)
QGQDRHMIRMRQLIDIVDQLKNYVNDLVPEFLPAPEDVETNCEWSAFSC
FQKAQLKSANTGNNERIINVSIKKLKRKPPSTNAGRRQKHRLTCPSCDS
YEKKPPKEFLERFKSLLQKMIHQHLSSRTHGSEDSITCPPPMSVEHADI
WVKSYSLYSRERYICNSGFKRKAGTSSLTECVLNKATNVAHWTTPSLKC
IR.

[0657] In some embodiments, a second chimeric polypeptide is encoded by a sequence that is at least 80% identical (e.g., at least 82% identical, at least 84% identical, at least 86% identical, at least 88% identical, at least 90% identical, at least 92% identical, at least 94% identical, at least 96% identical, at least 98% identical, at least 99% identical, or 100% identical) to:

(SEQ ID NO: 212)
CAGGGCCAGGACAGGCACATGATCCGGATGAGGCAGCTCATCGACATCG
TCGACCAGCTGAAGAACTACGTGAACGACCTGGTGCCCGAGTTTCTGCC
TGCCCCCGAGGACGTGGAGACCAACTGCGAGTGGTCCGCCTTCTCCTGC
TTTCAGAAGGCCCAGCTGAAGTCCGCCAACACCGGCAACAACGAGCGGA
TCATCAACGTGAGCATCAAGAAGCTGAAGCGGAAGCCTCCCTCCACAAA
CGCCGGCAGGAGGCAGAAGCACAGGCTGACCTGCCCCAGCTGTGACTCC
TACGAGAAGAAGCCCCCCAAGGAGTTCCTGGAGAGGTTCAAGTCCCTGC
TGCAGAAGATGATCCATCAGCACCTGTCCTCCAGGACCCACGGCTCCGA
GGACTCCATTACATGCCCCCCTCCCATGAGCGTGGAGCACGCCGACATC
TGGGTGAAGAGCTATAGCCTCTACAGCCGGGAGAGGTATATCTGTAACA
GCGGCTTCAAGAGGAAGGCCGGCACCAGCAGCCTCACCGAGTGCGTGCT
GAATAAGGCTACCAACGTGGCTCACTGGACAACACCCTCTTTAAAGTGC
ATCCGG.

[0658] In some embodiments, a second chimeric polypeptide can include a sequence that is at least 80% identical (e.g., at least 82% identical, at least 84% identical, at least 86% identical, at least 88% identical, at least 90% identical, at least 92% identical, at least 94% identical, at least 96% identical, at least 98% identical, at least 99% identical, or 100% identical) to:

(SEQ ID NO: 213)
MKWVTFISLLFLFSSAYSQGQDRHMIRMRQLIDIVDQLKNYVNDLVPEF
LPAPEDVETNCEWSAFSCFQKAQLKSANTGNNERIINVSIKKLKRKPPS
TNAGRRQKHRLTCPSCDSYEKKPPKEFLERFKSLLQKMIHQHLSSRTHG
SEDSITCPPPMSVEHADIWVKSYSLYSRERYICNSGFKRKAGTSSLTEC
VLNKATNVAHWTTPSLKCIR.

[0659] In some embodiments, a second chimeric polypeptide is encoded by a sequence that is at least 80% identical (e.g., at least 82% identical, at least 84% identical, at least 86% identical, at least 88% identical, at least 90% identical, at least 92% identical, at least 94% identical, at least 96% identical, at least 98% identical, at least 99% identical, or 100% identical) to:

(SEQ ID NO: 214)
ATGAAGTGGGTGACCTTCATCAGCCTGCTGTTCCTGTTCTCCAGCGCCT
ACTCCCAGGGCCAGGACAGGCACATGATCCGGATGAGGCAGCTCATCGA
CATCGTCGACCAGCTGAAGAACTACGTGAACGACCTGGTGCCCGAGTTT
CTGCCTGCCCCCGAGGACGTGGAGACCAACTGCGAGTGGTCCGCCTTCT
CCTGCTTTCAGAAGGCCCAGCTGAAGTCCGCCAACACCGGCAACAACGA
GCGGATCATCAACGTGAGCATCAAGAAGCTGAAGCGGAAGCCTCCCTCC
ACAAACGCCGGCAGGAGGCAGAAGCACAGGCTGACCTGCCCCAGCTGTG
ACTCCTACGAGAAGAAGCCCCCCAAGGAGTTCCTGGAGAGGTTCAAGTC
CCTGCTGCAGAAGATGATCCATCAGCACCTGTCCTCCAGGACCCACGGC
TCCGAGGACTCCATTACATGCCCCCCTCCCATGAGCGTGGAGCACGCCG
ACATCTGGGTGAAGAGCTATAGCCTCTACAGCCGGGAGAGGTATATCTG
TAACAGCGGCTTCAAGAGGAAGGCCGGCACCAGCAGCCTCACCGAGTGC
GTGCTGAATAAGGCTACCAACGTGGCTCACTGGACAACACCCTCTTTAA
AGTGCATCCGG.

### Exemplary Multi-Chain Chimeric Polypeptides—Type E

[0660] In some embodiments of any of the multi-chain chimeric polypeptides described herein, the first target-binding domain and the second targeting-binding domain each independently bind specifically to a receptor for IL-18 (e.g., a soluble human IL-18), a receptor for IL-12 (e.g., a soluble human IL-12), or CD16 (e.g., an anti-CD16 scFv). In some embodiments of these multi-chain chimeric polypeptides described herein, the first chimeric polypeptide further includes the additional target-binding domain. In some embodiments of these multi-chain chimeric polypeptides described herein, the second chimeric polypeptide further includes the additional target-binding domain. In some embodiments of these multi-chain chimeric polypeptides described herein, the additional target-binding domain binds specifically to CD16 or a receptor for IL-12.

[0661] In some examples of these multi-chain chimeric polypeptides, the first target-binding domain and the soluble tissue factor domain directly abut each other in the first chimeric polypeptide. In some examples of these multi-chain chimeric polypeptides, the first chimeric polypeptide further comprises a linker sequence (e.g., any of the exemplary linkers described herein) between the first target-binding domain and the soluble tissue factor domain in the first chimeric polypeptide.

[0662] In some embodiments of these multi-chain chimeric polypeptides, the soluble tissue factor domain and the first domain of the pair of affinity domains directly abut each other in the first chimeric polypeptide. In some embodiments of these multi-chain chimeric polypeptides, the first chimeric polypeptide further includes a linker sequence (e.g., any of the exemplary linkers described herein) between the soluble tissue factor domain and the first domain of the pair of affinity domains in the first chimeric polypeptide.

[0663] In some embodiments of these multi-chain chimeric polypeptides, the second domain of the pair of affinity domains and the second target-binding domain directly abut each other in the second chimeric polypeptide. In some embodiments of these multi-chain chimeric polypeptides, the second chimeric polypeptide further includes a linker sequence (e.g., any of the exemplary linkers described herein) between the second domain of the pair of affinity domains and the second target-binding domain in the second chimeric polypeptide.

[0664] In some embodiments, the second chimeric polypeptide further comprises one or more additional target-binding domains at the N-terminal end or the C-terminal end of the second chimeric polypeptide.

[0665] In some embodiments of these multi-chain chimeric polypeptides, the additional target-binding domain and the second domain of the pair of affinity domains directly abut each other in the second chimeric polypeptide. In some embodiments of these multi-chain chimeric polypeptides, the second chimeric polypeptide further includes a linker sequence (e.g., any of the exemplary linkers described herein) between the second domain of the pair of affinity domains and the additional target-binding domain in the second chimeric polypeptide.

[0666] In some embodiments of these multi-chain chimeric polypeptides, the additional target-binding domain and the second target-binding domain directly abut each other in the second chimeric polypeptide. In some embodiments of these multi-chain chimeric polypeptides, the second chimeric polypeptide further includes a linker sequence (e.g., any of the exemplary linkers described herein) between the second target-binding domain and the additional target-binding domain in the second chimeric polypeptide.

[0667] In some embodiments of these multi-chain chimeric polypeptides, the soluble tissue factor domain can be any of the exemplary soluble tissue factor domains described herein. In some embodiments of these multi-chain chimeric polypeptides, the pair of affinity domains can be any of the exemplary pairs of affinity domains described herein.

[0668] In some embodiments of these multi-chain chimeric polypeptides, one or more of the first target-binding domain, the second target-binding domain and the additional antigen-binding domain is an agonistic antigen-binding domain. In some embodiments of these multi-chain chimeric polypeptides, the first target-binding domain, the second target-binding domain, and the additional antigen-binding domain are each agonistic antigen-binding domains. In some embodiments of these multi-chain chimeric polypeptides, the antigen-binding domain includes a scFv or single-domain antibody.

[0669] In some embodiments of these multi-chain chimeric polypeptides, one or both of the first target-binding domain and the second target-binding domain is a soluble IL-15 or a soluble IL-18. In some embodiments of these multi-chain chimeric polypeptides, the first target-binding domain and the second target-binding domain are each independently a soluble IL-15 or a soluble IL-18. In some embodiments of these multi-chain chimeric polypeptides, the first target-binding domain and the second target-binding domain both bind specifically to a receptor of IL-18 or a receptor of IL-12. In some embodiments of these multi-chain chimeric polypeptides, the first target-binding domain and the second target-binding domain bind specifically to the same epitope. In some embodiments of these multi-chain chimeric polypeptides, the first target-binding domain and the second target-binding domain include the same amino acid sequence.

[0670] In some embodiments of these multi-chain chimeric polypeptides, the first target-binding domain binds specifically to a receptor for IL-12, and the second target-binding domain binds specifically to a receptor for IL-18. In some embodiments of these multi-chain chimeric polypeptides, the first target-binding domain binds specifically to a receptor for IL-18, and the second target-binding domain bind specifically to a receptor for IL-12. In some embodiments of these multi-chain chimeric polypeptides, the first target-binding domain binds specifically to CD16, and the second target-binding domain binds specifically to a receptor for IL-18. In some embodiments of these multi-chain chimeric polypeptides, the first target-binding domain binds specifically to a receptor for IL-18, and the second target-binding domain bind specifically to CD16.

[0671] In some embodiments of these multi-chain chimeric polypeptides, two or more of the first target-binding domain, the second target-binding domain, and the one or more additional target-binding domains bind specifically to the same antigen. In some embodiments, two or more of the first target-binding domain, the second target-binding domain, and the one or more additional target-binding domains bind specifically to the same epitope. In some embodiments, two or more of the first target-binding domain, the second target-binding domain, and the one or more additional target-binding domains comprise the same amino acid sequence.

[0672] In some embodiments of these multi-chain chimeric polypeptides, the first target-binding domain includes a soluble IL-18 (e.g., a soluble human IL-18).

[0673] In some embodiments of these multi-chain chimeric polypeptides, the soluble human IL-18 includes a sequence that is at least 80% identical (e.g., at least 82% identical, at least 84% identical, at least 86% identical, at least 88% identical, at least 90% identical, at least 92% identical, at least 94% identical, at least 96% identical, at least 98% identical, at least 99% identical, or 100% identical) to:

(SEQ ID NO: 109)
YFGKLESKLSVIRNLNDQVLFIDQGNRPLFEDMTDSDCRDNAPRTIFIIS
MYKDSQPRGMAVTISVKCEKISTLSCENKIISFKEMNPPDNIKDTKSDII
FFQRSVPGHDNKMQFESSSYEGYFLACEKERDLFKLILKKEDELGDRSIM
FTVQNED.

[0674] In some embodiments of these multi-chain chimeric polypeptides, the soluble human IL-18 is encoded by a sequence that is at least 80% identical (e.g., at least 82% identical, at least 84% identical, at least 86% identical, at least 88% identical, at least 90% identical, at least 92% identical, at least 94% identical, at least 96% identical, at least 98% identical, at least 99% identical, or 100% identical) to:

(SEQ ID NO: 171)
TACTTCGGCAAACTGGAATCCAAGCTGAGCGTGATCCGGAATTTAAACGA
CCAAGTTCTGTTTATCGATCAAGGTAACCGGCCTCTGTTCGAGGACATGA
CCGACTCCGATTGCCGGGACAATGCCCCCCGGACCATCTTCATTATCTCC
ATGTACAAGGACAGCCAGCCCCGGGGCATGGCTGTGACAATTAGCGTGAA
GTGTGAGAAAATCAGCACTTTATCTTGTGAGAACAAGATCATCTCCTTTA
AGGAAATGAACCCCCCCGATAACATCAAGGACACCAAGTCCGATATCATC
TTCTTCCAGCGGTCCGTGCCCGGTCACGATAACAAGATGCAGTTCGAATC
CTCCTCCTACGAGGGCTACTTTTTAGCTTGTGAAAAGGAGAGGGATTTAT
TCAAGCTGATCCTCAAGAAGGAGGACGAGCTGGGCGATCGTTCCATCATG
TTCACCGTCCAAAACGAGGAT.

[0675] In some embodiments of these multi-chain chimeric polypeptides, the second target-binding domain includes a soluble IL-12 (e.g., a soluble human IL-12). In some embodiments of these multi-chain chimeric polypeptides, the soluble human IL-15 includes a sequence of soluble human IL-12β (p40) and a sequence of soluble human IL-12a (p35). In some embodiments of these multi-chain chimeric polypeptides, the soluble IL-15 (e.g., soluble human IL-15) further includes a linker sequence (e.g., any of the exemplary linker sequences described herein) between the sequence of soluble IL-120 (p40) and the sequence of soluble human IL-12α (p35). In some examples of these multi-chain chimeric polypeptides, the linker sequence comprises GGGGSGGGGSGGGGS (SEQ ID NO: 102).

[0676] In some embodiments of these multi-chain chimeric polypeptides, the sequence of soluble human IL-12β (p40) comprises a sequence that is at least 80% identical (e.g., at least 82% identical, at least 84% identical, at least 86% identical, at least 88% identical, at least 90% identical, at least 92% identical, at least 94% identical, at least 96% identical, at least 98% identical, at least 99% identical, or 100% identical) to:

(SEQ ID NO: 81)
IWELKKDVYVVELDWYPDAPGEMVVLTCDTPEEDGITWTLDQSSEVLGSG
KTLTIQVKEFGDAGQYTCHKGGEVLSHSLLLLHKKEDGIWSTDILKDQKE
PKNKTFLRCEAKNYSGRFTCWWLTTISTDLTFSVKSSRGSSDPQGVTCGA
ATLSAERVRGDNKEYEYSVECQEDSACPAAEESLPIEVMVDAVHKLKYEN
YTSSFFIRDIIKPDPPKNLQLKPLKNSRQVEVSWEYPDTWSTPHSYFSLT
FCVQVQGKSKREKKDRVFTDKTSATVICRKNASISVRAQDRYYSSSWSEW
ASVPCS.

[0677] In some embodiments of these multi-chain chimeric polypeptides, the soluble human IL-12β (p40) is encoded by a sequence that is at least 80% identical (e.g., at least 82% identical, at least 84% identical, at least 86% identical, at least 88% identical, at least 90% identical, at least 92% identical, at least 94% identical, at least 96% identical, at least 98% identical, at least 99% identical, or 100% identical) to:

(SEQ ID NO: 172)
ATTTGGGAACTGAAGAAGGACGTCTACGTGGTCGAACTGGACTGGTATCC
CGATGCTCCCGGCGAAATGGTGGTGCTCACTTGTGACACCCCCGAAGAAG
ACGGCATCACTTGGACCCTCGATCAGAGCAGCGAGGTGCTGGGCTCCGGA
AAGACCCTCACAATCCAAGTTAAGGAGTTCGGAGACGCTGGCCAATACAC
ATGCCACAAGGGAGGCGAGGTGCTCAGCCATTCCTTATTATTATTACACA
AGAAGGAAGACGGAATCTGGTCCACCGACATTTTAAAAGATCAGAAGGAG
CCCAAGAATAAGACCTTTTTAAGGTGTGAGGCCAAAAACTACAGCGGTCG
TTTCACTTGTTGGTGGCTGACCACCATTTCCACCGATTTAACCTTCTCCG
TGAAAAGCAGCCGGGGAAGCTCCGACCCTCAAGGTGTGACATGTGGAGCC
GCTACCCTCAGCGCTGAGAGGGTTCGTGGCGATAACAAGGAATACGAGTA
CAGCGTGGAGTGCCAAGAAGATAGCGCTTGTCCCGCTGCCGAAGAATCTT
TACCCATTGAGGTGATGGTGGACGCCGTGCACAAACTCAAGTACGAGAAC
TACACCTCCTCCTTCTTTATCCGGGACATCATTAAGCCCGATCCTCCTAA
GAATTTACAGCTGAAGCCTCTCAAAAATAGCCGGCAAGTTGAGGTCTCTT
GGGAATATCCCGACACTTGGAGCACACCCCACAGCTACTTCTCTTTAACC
TTTTGTGTGCAAGTTCAAGGTAAAAGCAAGCGGGAGAAGAAAGACCGGGT
GTTTACCGACAAAACCAGCGCCACCGTCATCTGTCGGAAGAACGCCTCCA
TCAGCGTGAGGGCTCAAGATCGTTATTACTCCAGCAGCTGGTCCGAGTGG
GCCAGCGTGCCTTGTTCC.

[0678] In some embodiments of these multi-chain chimeric polypeptides, the soluble human IL-12α (p35) includes a sequence that is at least 80% identical (e.g., at least 82% identical, at least 84% identical, at least 86% identical, at least 88% identical, at least 90% identical, at least 92% identical, at least 94% identical, at least 96% identical, at least 98% identical, at least 99% identical, or 100% identical) to:

(SEQ ID NO: 80)
RNLPVATPDPGMFPCLEIRSQNLLRAVSNMLQKARQTLEFYPCTSEEIDH
EDITKDKTSTVEACLPLELTKNESCLNSRETSFITNGSCLASRKTSFMMA
LCLSSIYEDLKMYQVEFKTMNAKLLMDPKRQIFLDQNMLAVIDELMQALN
FNSETVPQKSSLEEPDFYKTKIKLCILLHAFRIRAVTIDRVMSYLNAS.

[0679] In some embodiments of these multi-chain chimeric polypeptides, the soluble human IL-12α (p35) is encoded by a sequence that is at least 80% identical (e.g., at least 82% identical, at least 84% identical, at least 86% identical, at least 88% identical, at least 90% identical, at least 92% identical, at least 94% identical, at least 96% identical, at least 98% identical, at least 99% identical, or 100% identical) to:

(SEQ ID NO: 173)
CGTAACCTCCCCGTGGCTACCCCCGATCCCGGAATGTTCCCTTGTTTACA
CCACAGCCAGAATTTACTGAGGGCCGTGAGCAACATGCTGCAGAAAGCTA
GGCAGACTTTAGAATTTTACCCTTGCACCAGCGAGGAGATCGACCATGAA
GATATCACCAAGGACAAGACATCCACCGTGGAGGCTTGTTTACCTCTGGA
GCTGACAAAGAACGAGTCTTGTCTCAACTCTCGTGAAACCAGCTTCATCA
CAAATGGCTCTTGTTTAGCTTCCCGGAAGACCTCCTTTATGATGGCTTTA
TGCCTCAGCTCCATCTACGAGGATTTAAAGATGTACCAAGTGGAGTTCAA
GACCATGAACGCCAAGCTGCTCATGGACCCTAAACGGCAGATCTTTTTAG
ACCAGAACATGCTGGCTGTGATTGATGAGCTGATGCAAGCTTTAAACTTC
AACTCCGAGACCGTCCCTCAGAAGTCCTCCCTCGAGGAGCCCGATTTTTA
CAAGACAAAGATCAAACTGTGCATTTTACTCCACGCCTTTAGGATCCGGG
CCGTGACCATTGACCGGGTCATGAGCTATTTAAACGCCAGC.

[0680] In some embodiments of these multi-chain chimeric polypeptides, the additional target-binding domain includes an scFv that specifically binds to CD16 (e.g., an anti-CD16 scFv).

[0681] In some embodiments of these multi-chain chimeric polypeptides, the scFv that binds specifically to CD16 includes a light chain variable domain that includes a sequence that is at least 80% identical (e.g., at least 82% identical, at least 84% identical, at least 86% identical, at least 88% identical, at least 90% identical, at least 92% identical, at least 94% identical, at least 96% identical, at least 98% identical, at least 99% identical, or 100% identical) to:

(SEQ ID NO: 215)
SELTQDPAVSVALGQTVRITCQGDSLRSYYASWYQQKPGQAPVLVIYGKN
NRPSGIPDRFSGSSSGNTASLTITGAQAEDEADYYCNSRDSSGNHVVFGG
GTKLTVGH.

[0682] In some embodiments of these multi-chain chimeric polypeptides, the scFv that binds specifically to CD16 is encoded by a light chain variable domain sequence that is at least 80% identical (e.g., at least 82% identical, at least 84% identical, at least 86% identical, at least 88% identical, at least 90% identical, at least 92% identical, at least 94% identical, at least 96% identical, at least 98% identical, at least 99% identical, or 100% identical) to:

(SEQ ID NO: 216)
TCCGAGCTGACCCAGGACCCTGCTGTGTCCGTGGCTCTGGGCCAGACCGT
GAGGATCACCTGCCAGGGCGACTCCCTGAGGTCCTACTACGCCTCCTGGT
ACCAGCAGAAGCCCGGCCAGGCTCCTGTGCTGGTGATCTACGGCAAGAAC
AACAGGCCCTCCGGCATCCCTGACAGGTTCTCCGGATCCTCCTCCGGCAA
CACCGCCTCCCTGACCATCACAGGCGCTCAGGCCGAGGACGAGGCTGACT
ACTACTGCAACTCCAGGGACTCCTCCGGCAACCATGTGGTGTTCGGCGGC
GGCACCAAGCTGACCGTGGGCCAT.

[0683] In some embodiments of these multi-chain chimeric polypeptides, the scFv that binds specifically to CD16 includes a heavy chain variable domain that includes a sequence that is at least 80% identical (e.g., at least 82% identical, at least 84% identical, at least 86% identical, at least 88% identical, at least 90% identical, at least 92% identical, at least 94% identical, at least 96% identical, at least 98% identical, at least 99% identical, or 100% identical) to:

(SEQ ID NO: 217)
EVQLVESGGGVVRPGGSLRLSCAASGFTFDDYGMSWVRQAPGKGLEWVSG
INWNGGSTGYADSVKGRFTISRDNAKNSLYLQMNSLRAEDTAVYYCARGR
SLLFDYWGQGTLVTVSR.

[0684] In some embodiments of these multi-chain chimeric polypeptides, the scFv that binds specifically to CD16 is encoded by a heavy chain variable domain sequence that is at least 80% identical (e.g., at least 82% identical, at least 84% identical, at least 86% identical, at least 88% identical, at least 90% identical, at least 92% identical, at least 94% identical, at least 96% identical, at least 98% identical, at least 99% identical, or 100% identical) to:

(SEQ ID NO: 218)
GAGGTGCAGCTGGTGGAGTCCGGAGGAGGAGTGGTGAGGCCTGGAGGCTC
CCTGAGGCTGAGCTGTGCTGCCTCCGGCTTCACCTTCGACGACTACGGCA
TGTCCTGGGTGAGGCAGGCTCCTGGAAAGGGCCTGGAGTGGGTGTCCGGC
ATCAACTGGAACGGCGGATCCACCGGCTACGCCGATTCCGTGAAGGGCAG
GTTCACCATCAGCAGGGACAACGCCAAGAACTCCCTGTACCTGCAGATGA
ACTCCCTGAGGGCCGAGGACACCGCCGTGTACTACTGCGCCAGGGGCAGG
TCCCTGCTGTTCGACTACTGGGGACAGGGCACCCTGGTGACCGTGTCCAG
G.

[0685] In some embodiments, the first chimeric polypeptide can include a sequence that is at least 80% identical (e.g., at least 82% identical, at least 84% identical, at least 86% identical, at least 88% identical, at least 90% identical, at least 92% identical, at least 94% identical, at least 96% identical, at least 98% identical, at least 99% identical, or 100% identical) to:

(SEQ ID NO: 174)
YFGKLESKLSVIRNLNDQVLFIDQGNRPLFEDMTDSDCRDNAPRTIFIIS
MYKDSQPRGMAVTISVKCEKISTLSCENKIISFKEMNPPDNIKDTKSDII
FFQRSVPGHDNKMQFESSSYEGYFLACEKERDLFKLILKKEDELGDRSIM
FTVQNEDSGTTNTVAAYNLTWKSTNFKTILEWEPKPVNQVYTVQISTKSG
DWKSKCFYTTDTECDLTDEIVKDVKQTYLARVFSYPAGNVESTGSAGEPL
YENSPEFTPYLETNLGQPTIQSFEQVGTKVNVTVEDERTLVRRNNTFLSL
RDVFGKDLIYTLYYWKSSSSGKKTAKTNTNEFLIDVDKGENYCFSVQAVI
PSRTVNRKSTDSPVECMGQEKGEFRENWVNVISDLKKIEDLIQSMHIDAT
LYTESDVHPSCKVTAMKCFLLELQVISLESGDASIHDTVENLIILANNSL
SSNGNVTESGCKECEELEEKNIKEFLQSFVHIVQMFINTS.

[0686] In some embodiments, a first chimeric polypeptide is encoded by a sequence that is at least 80% identical (e.g., at least 82% identical, at least 84% identical, at least 86% identical, at least 88% identical, at least 90% identical, at least 92% identical, at least 94% identical, at least 96% identical, at least 98% identical, at least 99% identical, or 100% identical) to:

(SEQ ID NO: 175)
TACTTCGGCAAACTGGAATCCAAGCTGAGCGTGATCCGGAATTTAAACGA
CCAAGTTCTGTTTATCGATCAAGGTAACCGGCCTCTGTTCGAGGACATGA
CCGACTCCGATTGCCGGGACAATGCCCCCCGGACCATCTTCATTATCTCC
ATGTACAAGGACAGCCAGCCCCGGGGCATGGCTGTGACAATTAGCGTGAA
GTGTGAGAAAATCAGCACTTTATCTTGTGAGAACAAGATCATCTCCTTTA
AGGAAATGAACCCCCCCGATAACATCAAGGACACCAAGTCCGATATCATC
TTCTTCCAGCGGTCCGTGCCCGGTCACGATAACAAGATGCAGTTCGAATC
CTCCTCCTACGAGGGCTACTTTTTAGCTTGTGAAAAGGAGAGGGATTTAT
TCAAGCTGATCCTCAAGAAGGAGGACGAGCTGGGCGATCGTTCCATCATG
TTCACCGTCCAAAACGAGGATAGCGGCACAACCAACACAGTCGCTGCCTA
TAACCTCACTTGGAAGAGCACCAACTTCAAAACCATCCTCGAATGGGAAC
CCAAACCCGTTAACCAAGTTTACACCGTGCAGATCAGCACCAAGTCCGGC
GACTGGAAGTCCAAATGTTTCTATACCACCGACACCGAGTGCGATCTCAC
CGATGAGATCGTGAAAGATGTGAAACAGACCTACCTCGCCCGGGTGTTTA
GCTACCCCGCCGGCAATGTGGAGAGCACTGGTTCCGCTGGCGAGCCTTTA
TACGAGAACAGCCCCGAATTTACCCCTTACCTCGAGACCAATTTAGGACA
GCCCACCATCCAAAGCTTTGAGCAAGTTGGCACAAAGGTGAATGTGACAG
TGGAGGACGAGCGGACTTTAGTGCGGCGGAACAACACCTTTCTCAGCCTC
CGGGATGTGTTCGGCAAAGATTTAATCTACACACTGTATTACTGGAAGTC
CTCTTCCTCCGGCAAGAAGACAGCTAAAACCAACACAAACGAGTTTTTAA
TCGACGTGGATAAAGGCGAAAACTACTGTTTCAGCGTGCAAGCTGTGATC
CCCTCCCGGACCGTGAATAGGAAAAGCACCGATAGCCCCGTTGAGTGCAT
GGGCCAAGAAAAGGGCGAGTTCCGGGAGAACTGGGTGAACGTCATCAGCG
ATTTAAAGAAGATCGAAGATTTAATTCAGTCCATGCATATCGACGCCACT
TTATACACAGAATCCGACGTGCACCCCTCTTGTAAGGTGACCGCCATGAA
ATGTTTTTTACTGGAGCTGCAAGTTATCTCTTTAGAGAGCGGAGACGCTA
GCATCCACGACACCGTGGAGAATTTAATCATTTTAGCCAATAACTCTTTA
TCCAGCAACGGCAACGTGACAGAGTCCGGCTGCAAGGAGTGCGAAGAGCT
GGAGGAGAAGAACATCAAGGAGTTTCTGCAATCCTTTGTGCACATTGTCC
AGATGTTCATCAATACCTCC.

[0687] In some embodiments, a first chimeric polypeptide can include a sequence that is at least 80% identical (e.g., at least 82% identical, at least 84% identical, at least 86% identical, at least 88% identical, at least 90% identical, at least 92% identical, at least 94% identical, at least 96% identical, at least 98% identical, at least 99% identical, or 100% identical) to:

(SEQ ID NO: 176)
MKWVTFISLLFLFSSAYSYFGKLESKLSVIRNLNDQVLFIDQGNRPLFED
MTDSDCRDNAPRTIFIISMYKDSQPRGMAVTISVKCEKISTLSCENKIIS
FKEMNPPDNIKDTKSDIIFFQRSVPGHDNKMQFESSSYEGYFLACEKERD
LFKLILKKEDELGDRSIMFTVQNEDSGTTNTVAAYNLTWKSTNFKTILEW
EPKPVNQVYTVQISTKSGDWKSKCFYTTDTECDLTDEIVKDVKQTYLARV
FSYPAGNVESTGSAGEPLYENSPEFTPYLETNLGQPTIQSFEQVGTKVNV
TVEDERTLVRRNNTFLSLRDVFGKDLIYTLYYWKSSSSGKKTAKTNTNEF
LIDVDKGENYCFSVQAVIPSRTVNRKSTDSPVECMGQEKGEFRENWVNVI
SDLKKIEDLIQSMHIDATLYTESDVHPSCKVTAMKCFLLELQVISLESGD
ASIHDTVENLIILANNSLSSNGNVTESGCKECEELEEKNIKEFLQSFVHI
VQMFINTS.

[0688] In some embodiments, a first chimeric polypeptide is encoded by a sequence that is at least 80% identical (e.g., at least 82% identical, at least 84% identical, at least 86% identical, at least 88% identical, at least 90% identical, at least 92% identical, at least 94% identical, at least 96% identical, at least 98% identical, at least 99% identical, or 100% identical) to:

(SEQ ID NO: 177)
ATGAAGTGGGTCACATTTATCTCTTTACTGTTCCTCTTCTCCAGCGCCTA
CAGCTACTTCGGCAAACTGGAATCCAAGCTGAGCGTGATCCGGAATTTAA
ACGACCAAGTTCTGTTTATCGATCAAGGTAACCGGCCTCTGTTCGAGGAC
ATGACCGACTCCGATTGCCGGGACAATGCCCCCCGGACCATCTTCATTAT
CTCCATGTACAAGGACAGCCAGCCCCGGGGCATGGCTGTGACAATTAGCG
TGAAGTGTGAGAAAATCAGCACTTTATCTTGTGAGAACAAGATCATCTCC
TTTAAGGAAATGAACCCCCCCGATAACATCAAGGACACCAAGTCCGATAT
CATCTTCTTCCAGCGGTCCGTGCCCGGTCACGATAACAAGATGCAGTTCG
AATCCTCCTCCTACGAGGGCTACTTTTTAGCTTGTGAAAAGGAGAGGGAT
TTATTCAAGCTGATCCTCAAGAAGGAGGACGAGCTGGGCGATCGTTCCAT
CATGTTCACCGTCCAAAACGAGGATAGCGGCACAACCAACACAGTCGCTG
CCTATAACCTCACTTGGAAGAGCACCAACTTCAAAACCATCCTCGAATGG
GAACCCAAACCCGTTAACCAAGTTTACACCGTGCAGATCAGCACCAAGTC
CGGCGACTGGAAGTCCAAATGTTTCTATACCACCGACACCGAGTGCGATC
TCACCGATGAGATCGTGAAAGATGTGAAACAGACCTACCTCGCCCGGGTG
TTTAGCTACCCCGCCGGCAATGTGGAGAGCACTGGTTCCGCTGGCGAGCC
TTTATACGAGAACAGCCCCGAATTTACCCCTTACCTCGAGACCAATTTAG
GACAGCCCACCATCCAAAGCTTTGAGCAAGTTGGCACAAAGGTGAATGTG
ACAGTGGAGGACGAGCGGACTTTAGTGCGGCGGAACAACACCTTTCTCAG
CCTCCGGGATGTGTTCGGCAAAGATTTAATCTACACACTGTATTACTGGA
AGTCCTCTTCCTCCGGCAAGAAGACAGCTAAAACCAACACAAACGAGTTT
TTAATCGACGTGGATAAAGGCGAAAACTACTGTTTCAGCGTGCAAGCTGT
GATCCCCTCCCGGACCGTGAATAGGAAAAGCACCGATAGCCCCGTTGAGT
GCATGGGCCAAGAAAAGGGCGAGTTCCGGGAGAACTGGGTGAACGTCATC
AGCGATTTAAAGAAGATCGAAGATTTAATTCAGTCCATGCATATCGACGC
CACTTTATACACAGAATCCGACGTGCACCCCTCTTGTAAGGTGACCGCCA
TGAAATGTTTTTTACTGGAGCTGCAAGTTATCTCTTTAGAGAGCGGAGAC
GCTAGCATCCACGACACCGTGGAGAATTTAATCATTTTAGCCAATAACTC
TTTATCCAGCAACGGCAACGTGACAGAGTCCGGCTGCAAGGAGTGCGAAG
AGCTGGAGGAGAAGAACATCAAGGAGTTTCTGCAATCCTTTGTGCACATT
GTCCAGATGTTCATCAATACCTCC.

[0689] In some embodiments, the second chimeric polypeptide can include a sequence that is at least 80% identical (e.g., at least 82% identical, at least 84% identical, at least 86% identical, at least 88% identical, at least 90% identical, at least 92% identical, at least 94% identical, at least 96% identical, at least 98% identical, at least 99% identical, or 100% identical) to:

(SEQ ID NO: 223)
IWELKKDVYVVELDWYPDAPGEMVVLTCDTPEEDGITWTLDQSSEVLGSG
KTLTIQVKEFGDAGQYTCHKGGEVLSHSLLLLHKKEDGIWSTDILKDQKE
PKNKTFLRCEAKNYSGRFTCWWLTTISTDLTFSVKSSRGSSDPQGVTCGA
ATLSAERVRGDNKEYEYSVECQEDSACPAAEESLPIEVMVDAVHKLKYEN
YTSSFFIRDIIKPDPPKNLQLKPLKNSRQVEVSWEYPDTWSTPHSYFSLT
FCVQVQGKSKREKKDRVFTDKTSATVICRKNASISVRAQDRYYSSSWSEW
ASVPCSGGGGSGGGGSGGGGSRNLPVATPDPGMFPCLHESQNLLRAVSNM
LQKARQTLEFYPCTSEEIDHEDITKDKTSTVEACLPLELTKNESCLNSRE
TSFITNGSCLASRKTSFMMALCLSSIYEDLKMYQVEFKTMNAKLLMDPKR
QIFLDQNMLAVIDELMQALNFNSETVPQKSSLEEPDFYKTKIKLCILLHA
FRIRAVTIDRVMSYLNASITCPPPMSVEHADIWVKSYSLYSRERYICNSG
FKRKAGTSSLTECVLNKATNVAHWTTPSLKCIRSELTQDPAVSVALGQTV
RITCQGDSLRSYYASWYQQKPGQAPVLVIYGKNNRPSGIPDRFSGSSSGN
TASLTITGAQAEDEADYYCNSRDSSGNHVVFGGGTKLTVGHGGGGSGGGG
SGGGGSEVQLVESGGGVVRPGGSLRLSCAASGFTFDDYGMSWVRQAPGKG
LEWVSGINWNGGSTGYADSVKGRFTISRDNAKNSLYLQMNSLRAEDTAVY
YCARGRSLLFDYWGQGTLVTVSR.

[0690] In some embodiments, a second chimeric polypeptide is encoded by a sequence that is at least 80% identical (e.g., at least 82% identical, at least 84% identical, at least 86% identical, at least 88% identical, at least 90% identical, at least 92% identical, at least 94% identical, at least 96% identical, at least 98% identical, at least 99% identical, or 100% identical) to:

(SEQ ID NO: 224)
ATTTGGGAACTGAAGAAGGACGTCTACGTGGTCGAACTGGACTGGTATCC
CGATGCTCCCGGCGAAATGGTGGTGCTCACTTGTGACACCCCCGAAGAAG
ACGGCATCACTTGGACCCTCGATCAGAGCAGCGAGGTGCTGGGCTCCGGA
AAGACCCTCACAATCCAAGTTAAGGAGTTCGGAGACGCTGGCCAATACAC
ATGCCACAAGGGAGGCGAGGTGCTCAGCCATTCCTTATTATTATTACACA
AGAAGGAAGACGGAATCTGGTCCACCGACATTTTAAAAGATCAGAAGGAG
CCCAAGAATAAGACCTTTTTAAGGTGTGAGGCCAAAAACTACAGCGGTCG
TTTCACTTGTTGGTGGCTGACCACCATTTCCACCGATTTAACCTTCTCCG
TGAAAAGCAGCCGGGGAAGCTCCGACCCTCAAGGTGTGACATGTGGAGCC
GCTACCCTCAGCGCTGAGAGGGTTCGTGGCGATAACAAGGAATACGAGTA
CAGCGTGGAGTGCCAAGAAGATAGCGCTTGTCCCGCTGCCGAAGAATCTT
TACCCATTGAGGTGATGGTGGACGCCGTGCACAAACTCAAGTACGAGAAC
TACACCTCCTCCTTCTTTATCCGGGACATCATTAAGCCCGATCCTCCTAA
GAATTTACAGCTGAAGCCTCTCAAAAATAGCCGGCAAGTTGAGGTCTCTT
GGGAATATCCCGACACTTGGAGCACACCCCACAGCTACTTCTCTTTAACC
TTTTGTGTGCAAGTTCAAGGTAAAAGCAAGCGGGAGAAGAAAGACCGGGT
GTTTACCGACAAAACCAGCGCCACCGTCATCTGTCGGAAGAACGCCTCCA
TCAGCGTGAGGGCTCAAGATCGTTATTACTCCAGCAGCTGGTCCGAGTGG
GCCAGCGTGCCTTGTTCCGGCGGTGGAGGATCCGGAGGAGGTGGCTCCGG
CGGCGGAGGATCTCGTAACCTCCCCGTGGCTACCCCCGATCCCGGAATGT
TCCCTTGTTTACACCACAGCCAGAATTTACTGAGGGCCGTGAGCAACATG
CTGCAGAAAGCTAGGCAGACTTTAGAATTTTACCCTTGCACCAGCGAGGA
GATCGACCATGAAGATATCACCAAGGACAAGACATCCACCGTGGAGGCTT
GTTTACCTCTGGAGCTGACAAAGAACGAGTCTTGTCTCAACTCTCGTGAA
ACCAGCTTCATCACAAATGGCTCTTGTTTAGCTTCCCGGAAGACCTCCTT
TATGATGGCTTTATGCCTCAGCTCCATCTACGAGGATTTAAAGATGTACC
AAGTGGAGTTCAAGACCATGAACGCCAAGCTGCTCATGGACCCTAAACGG
CAGATCTTTTTAGACCAGAACATGCTGGCTGTGATTGATGAGCTGATGCA
AGCTTTAAACTTCAACTCCGAGACCGTCCCTCAGAAGTCCTCCCTCGAGG
AGCCCGATTTTTACAAGACAAAGATCAAACTGTGCATTTTACTCCACGCC
TTTAGGATCCGGGCCGTGACCATTGACCGGGTCATGAGCTATTTAAACGC
CAGCATTACATGCCCCCCTCCCATGAGCGTGGAGCACGCCGACATCTGGG
TGAAGAGCTATAGCCTCTACAGCCGGGAGAGGTATATCTGTAACAGCGGC
TTCAAGAGGAAGGCCGGCACCAGCAGCCTCACCGAGTGCGTGCTGAATAA
GGCTACCAACGTGGCTCACTGGACAACACCCTCTTTAAAGTGCATCCGGT
CCGAGCTGACCCAGGACCCTGCTGTGTCCGTGGCTCTGGGCCAGACCGTG
AGGATCACCTGCCAGGGCGACTCCCTGAGGTCCTACTACGCCTCCTGGTA
CCAGCAGAAGCCCGGCCAGGCTCCTGTGCTGGTGATCTACGGCAAGAACA
ACAGGCCCTCCGGCATCCCTGACAGGTTCTCCGGATCCTCCTCCGGCAAC
ACCGCCTCCCTGACCATCACAGGCGCTCAGGCCGAGGACGAGGCTGACTA
CTACTGCAACTCCAGGGACTCCTCCGGCAACCATGTGGTGTTCGGCGGCG
GCACCAAGCTGACCGTGGGCCATGGCGGCGGCGGCTCCGGAGGCGGCGGC
AGCGGCGGAGGAGGATCCGAGGTGCAGCTGGTGGAGTCCGGAGGAGGAGT
GGTGAGGCCTGGAGGCTCCCTGAGGCTGAGCTGTGCTGCCTCCGGCTTCA
CCTTCGACGACTACGGCATGTCCTGGGTGAGGCAGGCTCCTGGAAAGGGC
CTGGAGTGGGTGTCCGGCATCAACTGGAACGGCGGATCCACCGGCTACGC
CGATTCCGTGAAGGGCAGGTTCACCATCAGCAGGGACAACGCCAAGAACT
CCCTGTACCTGCAGATGAACTCCCTGAGGGCCGAGGACACCGCCGTGTAC
TACTGCGCCAGGGGCAGGTCCCTGCTGTTCGACTACTGGGGACAGGGCAC
CCTGGTGACCGTGTCCAGG.

[0691] In some embodiments, a second chimeric polypeptide can include a sequence that is at least 80% identical (e.g., at least 82% identical, at least 84% identical, at least 86% identical, at least 88% identical, at least 90% identical, at least 92% identical, at least 94% identical, at least 96% identical, at least 98% identical, at least 99% identical, or 100% identical) to:

(SEQ ID NO: 225)
MKWVTFISLLFLFSSAYSIWELKKDVYVVELDWYPDAPGEMVVLTCDTPE
EDGITWTLDQSSEVLGSGKTLTIQVKEFGDAGQYTCHKGGEVLSHSLLLL
HKKEDGIWSTDILKDQKEPKNKTFLRCEAKNYSGRFTCWWLTTISTDLTF
SVKSSRGSSDPQGVTCGAATLSAERVRGDNKEYEYSVECQEDSACPAAEE
SLPIEVMVDAVHKLKYENYTSSFFIRDIIKPDPPKNLQLKPLKNSRQVEV
SWEYPDTWSTPHSYFSLTFCVQVQGKSKREKKDRVFTDKTSATVICRKNA
SISVRAQDRYYSSSWSEWASVPCSGGGGSGGGGSGGGGSRNLPVATPDPG
MFPCLHHSQNLLRAVSNMLQKARQTLEFYPCTSEEIDHEDITKDKTSTVE
ACLPLELTKNESCLNSRETSFITNGSCLASRKTSFMMALCLSSIYEDLKM
YQVEFKTMNAKLLMDPKRQIFLDQNMLAVIDELMQALNFNSETVPQKSSL
EEPDFYKTKIKLCILLHAFRIRAVTIDRVMSYLNASITCPPPMSVEHADI
WVKSYSLYSRERYICNSGFKRKAGTSSLTECVLNKATNVAHWTTPSLKCI
RSELTQDPAVSVALGQTVRITCQGDSLRSYYASWYQQKPGQAPVLVIYGK
NNRPSGIPDRFSGSSSGNTASLTITGAQAEDEADYYCNSRDSSGNHVVFG
GGTKLTVGHGGGGSGGGGSGGGGSEVQLVESGGGVVRPGGSLRLSCAASG
FTFDDYGMSWVRQAPGKGLEWVSGINWNGGSTGYADSVKGRFTISRDNAK
NSLYLQMNSLRAEDTAVYYCARGRSLLFDYWGQGTLVTVSR.

[0692] In some embodiments, a second chimeric polypeptide is encoded by a sequence that is at least 80% identical (e.g., at least 82% identical, at least 84% identical, at least 86% identical, at least 88% identical, at least 90% identical, at least 92% identical, at least 94% identical, at least 96% identical, at least 98% identical, at least 99% identical, or 100% identical) to:

(SEQ ID NO: 226)
ATGAAATGGGTGACCTTTATTTCTTTACTGTTCCTCTTTAGCAGCGCCTA
CTCCATTTGGGAACTGAAGAAGGACGTCTACGTGGTCGAACTGGACTGGT
ATCCCGATGCTCCCGGCGAAATGGTGGTGCTCACTTGTGACACCCCCGAA
GAAGACGGCATCACTTGGACCCTCGATCAGAGCAGCGAGGTGCTGGGCTC
CGGAAAGACCCTCACAATCCAAGTTAAGGAGTTCGGAGACGCTGGCCAAT
ACACATGCCACAAGGGAGGCGAGGTGCTCAGCCATTCCTTATTATTATTA
CACAAGAAGGAAGACGGAATCTGGTCCACCGACATTTTAAAAGATCAGAA
GGAGCCCAAGAATAAGACCTTTTTAAGGTGTGAGGCCAAAAACTACAGCG
GTCGTTTCACTTGTTGGTGGCTGACCACCATTTCCACCGATTTAACCTTC
TCCGTGAAAAGCAGCCGGGGAAGCTCCGACCCTCAAGGTGTGACATGTGG
AGCCGCTACCCTCAGCGCTGAGAGGGTTCGTGGCGATAACAAGGAATACG
AGTACAGCGTGGAGTGCCAAGAAGATAGCGCTTGTCCCGCTGCCGAAGAA
TCTTTACCCATTGAGGTGATGGTGGACGCCGTGCACAAACTCAAGTACGA
GAACTACACCTCCTCCTTCTTTATCCGGGACATCATTAAGCCCGATCCTC
CTAAGAATTTACAGCTGAAGCCTCTCAAAAATAGCCGGCAAGTTGAGGTC
TCTTGGGAATATCCCGACACTTGGAGCACACCCCACAGCTACTTCTCTTT
AACCTTTTGTGTGCAAGTTCAAGGTAAAAGCAAGCGGGAGAAGAAAGACC
GGGTGTTTACCGACAAAACCAGCGCCACCGTCATCTGTCGGAAGAACGCC
TCCATCAGCGTGAGGGCTCAAGATCGTTATTACTCCAGCAGCTGGTCCGA
GTGGGCCAGCGTGCCTTGTTCCGGCGGTGGAGGATCCGGAGGAGGTGGCT
CCGGCGGCGGAGGATCTCGTAACCTCCCCGTGGCTACCCCCGATCCCGGA
ATGTTCCCTTGTTTACACCACAGCCAGAATTTACTGAGGGCCGTGAGCAA
CATGCTGCAGAAAGCTAGGCAGACTTTAGAATTTTACCCTTGCACCAGCG
AGGAGATCGACCATGAAGATATCACCAAGGACAAGACATCCACCGTGGAG
GCTTGTTTACCTCTGGAGCTGACAAAGAACGAGTCTTGTCTCAACTCTCG
TGAAACCAGCTTCATCACAAATGGCTCTTGTTTAGCTTCCCGGAAGACCT
CCTTTATGATGGCTTTATGCCTCAGCTCCATCTACGAGGATTTAAAGATG
TACCAAGTGGAGTTCAAGACCATGAACGCCAAGCTGCTCATGGACCCTAA
ACGGCAGATCTTTTTAGACCAGAACATGCTGGCTGTGATTGATGAGCTGA
TGCAAGCTTTAAACTTCAACTCCGAGACCGTCCCTCAGAAGTCCTCCCTC
GAGGAGCCCGATTTTTACAAGACAAAGATCAAACTGTGCATTTTACTCCA
CGCCTTTAGGATCCGGGCCGTGACCATTGACCGGGTCATGAGCTATTTAA
ACGCCAGCATTACATGCCCCCCTCCCATGAGCGTGGAGCACGCCGACATC
TGGGTGAAGAGCTATAGCCTCTACAGCCGGGAGAGGTATATCTGTAACAG
CGGCTTCAAGAGGAAGGCCGGCACCAGCAGCCTCACCGAGTGCGTGCTGA
ATAAGGCTACCAACGTGGCTCACTGGACAACACCCTCTTTAAAGTGCATC
CGGTCCGAGCTGACCCAGGACCCTGCTGTGTCCGTGGCTCTGGGCCAGAC
CGTGAGGATCACCTGCCAGGGCGACTCCCTGAGGTCCTACTACGCCTCCT
GGTACCAGCAGAAGCCCGGCCAGGCTCCTGTGCTGGTGATCTACGGCAAG
AACAACAGGCCCTCCGGCATCCCTGACAGGTTCTCCGGATCCTCCTCCGG
CAACACCGCCTCCCTGACCATCACAGGCGCTCAGGCCGAGGACGAGGCTG
ACTACTACTGCAACTCCAGGGACTCCTCCGGCAACCATGTGGTGTTCGGC
GGCGGCACCAAGCTGACCGTGGGCCATGGCGGCGGCGGCTCCGGAGGCGG
CGGCAGCGGCGGAGGAGGATCCGAGGTGCAGCTGGTGGAGTCCGGAGGAG
GAGTGGTGAGGCCTGGAGGCTCCCTGAGGCTGAGCTGTGCTGCCTCCGGC
TTCACCTTCGACGACTACGGCATGTCCTGGGTGAGGCAGGCTCCTGGAAA
GGGCCTGGAGTGGGTGTCCGGCATCAACTGGAACGGCGGATCCACCGGCT
ACGCCGATTCCGTGAAGGGCAGGTTCACCATCAGCAGGGACAACGCCAAG
AACTCCCTGTACCTGCAGATGAACTCCCTGAGGGCCGAGGACACCGCCGT
GTACTACTGCGCCAGGGGCAGGTCCCTGCTGTTCGACTACTGGGGACAGG
GCACCCTGGTGACCGTGTCCAGG.

### Exemplary Multi-Chain Chimeric Polypeptides—Type F

[0693] In some embodiments of any of the multi-chain chimeric polypeptides described herein, the first target-binding domain and the second targeting-binding domain each independently bind specifically to a receptor for IL-7 (e.g., a soluble human IL-7), CD16 (e.g., an anti-CD16 scFv), or a receptor for IL-21 (e.g., a soluble human IL-21). In some embodiments of these multi-chain chimeric polypeptides described herein, the first chimeric polypeptide further includes the additional target-binding domain. In some embodiments of these multi-chain chimeric polypeptides described herein, the second chimeric polypeptide further includes the additional target-binding domain. In some embodiments of these multi-chain chimeric polypeptides described herein, the additional target-binding domain binds specifically to CD16 or a receptor for IL-21.

[0694] In some examples of these multi-chain chimeric polypeptides, the first target-binding domain and the soluble tissue factor domain directly abut each other in the first chimeric polypeptide. In some examples of these multi-chain chimeric polypeptides, the first chimeric polypeptide further comprises a linker sequence (e.g., any of the exemplary linkers described herein) between the first target-binding domain and the soluble tissue factor domain in the first chimeric polypeptide.

[0695] In some embodiments of these multi-chain chimeric polypeptides, the soluble tissue factor domain and the first domain of the pair of affinity domains directly abut each other in the first chimeric polypeptide. In some embodiments of these multi-chain chimeric polypeptides, the first chimeric polypeptide further includes a linker sequence (e.g., any of the exemplary linkers described herein) between the soluble tissue factor domain and the first domain of the pair of affinity domains in the first chimeric polypeptide.

[0696] In some embodiments of these multi-chain chimeric polypeptides, the second domain of the pair of affinity domains and the second target-binding domain directly abut each other in the second chimeric polypeptide. In some embodiments of these multi-chain chimeric polypeptides, the second chimeric polypeptide further includes a linker sequence (e.g., any of the exemplary linkers described herein) between the second domain of the pair of affinity domains and the second target-binding domain in the second chimeric polypeptide.

[0697] In some embodiments, the second chimeric polypeptide further comprises one or more additional target-binding domains at the N-terminal end or the C-terminal end of the second chimeric polypeptide.

[0698] In some embodiments of these multi-chain chimeric polypeptides, the additional target-binding domain and the second domain of the pair of affinity domains directly abut each other in the second chimeric polypeptide. In some embodiments of these multi-chain chimeric polypeptides, the second chimeric polypeptide further includes a linker sequence (e.g., any of the exemplary linkers described herein) between the second domain of the pair of affinity domains and the additional target-binding domain in the second chimeric polypeptide.

[0699] In some embodiments of these multi-chain chimeric polypeptides, the additional target-binding domain and the second target-binding domain directly abut each other in the second chimeric polypeptide. In some embodiments of these multi-chain chimeric polypeptides, the second chimeric polypeptide further includes a linker sequence (e.g., any of the exemplary linkers described herein) between the second target-binding domain and the additional target-binding domain in the second chimeric polypeptide.

[0700] In some embodiments of these multi-chain chimeric polypeptides, the soluble tissue factor domain can be any of the exemplary soluble tissue factor domains described herein. In some embodiments of these multi-chain chimeric polypeptides, the pair of affinity domains can be any of the exemplary pairs of affinity domains described herein.

[0701] In some embodiments of these multi-chain chimeric polypeptides, one or more of the first target-binding domain, the second target-binding domain and the additional antigen-binding domain is an agonistic antigen-binding domain. In some embodiments of these multi-chain chimeric polypeptides, the first target-binding domain, the second target-binding domain, and the additional antigen-binding domain are each agonistic antigen-binding domains. In some embodiments of these multi-chain chimeric polypeptides, the antigen-binding domain includes a scFv or single-domain antibody.

[0702] In some embodiments of any of the multi-chain chimeric polypeptides described herein, the first target-binding domain binds specifically to a receptor IL-7 and the second target-binding domain binds specifically to CD16 or a receptor for IL-21. In some embodiments of any of the multi-chain chimeric polypeptides described herein, the first target-binding domain includes a soluble IL-7 protein. In some embodiments of any of the multi-chain chimeric polypeptides described herein, the soluble IL-7 protein is a soluble human IL-7. In some embodiments of any of the multi-chain chimeric polypeptides described herein, the second antigen-binding domain includes a target-binding domain that binds specifically to CD16. In some embodiments of any of the multi-chain chimeric polypeptides described herein, the second target-binding domain includes an scFv that binds specifically to CD16. In some embodiments of any of the multi-chain chimeric polypeptides described herein, the second target-binding domain binds specifically to a receptor for IL-21. In some embodiments of any of the multi-chain chimeric polypeptides described herein, the second target-binding domain includes a soluble IL-21. In some embodiments of any of the multi-chain chimeric polypeptides described herein, the soluble IL-21 is a soluble human IL-21. In some embodiments of any of the multi-chain chimeric polypeptides described herein, the second chimeric polypeptide further includes an additional target-binding domain that binds specifically to a receptor for IL-21. In some embodiments of any of the multi-chain chimeric polypeptides described herein, the additional target-binding domain includes a soluble IL-21. In some embodiments of any of the multi-chain chimeric polypeptides described herein, the soluble IL-21 is a soluble human IL-21. In some embodiments of any of the multi-chain chimeric polypeptides described herein, the second chimeric polypeptide further includes an additional target-binding domain that binds specifically to CD16.

[0703] In some embodiments of these multi-chain chimeric polypeptides, two or more of the first target-binding domain, the second target-binding domain, and the one or more additional target-binding domains bind specifically to the same antigen. In some embodiments, two or more of the first target-binding domain, the second target-binding domain, and the one or more additional target-binding domains bind specifically to the same epitope. In some embodiments, two or more of the first target-binding domain, the second target-binding domain, and the one or more additional target-binding domains comprise the same amino acid sequence.

[0704] In some embodiments of these multi-chain chimeric polypeptides, the first target-binding domain includes a soluble IL-7 (e.g., a soluble human IL-7).

[0705] In some embodiments of these multi-chain chimeric polypeptides, the soluble human IL-7 includes a sequence that is at least 80% identical (e.g., at least 82% identical, at least 84% identical, at least 86% identical, at least 88% identical, at least 90% identical, at least 92% identical, at least 94% identical, at least 96% identical, at least 98% identical, at least 99% identical, or 100% identical) to:

(SEQ ID NO: 79)
DCDIEGKDGKQYESVLMVSIDQLLDSMKEIGSNCLNNEFNFFKRHICDAN
KEGMFLFRAARKLRQFLKMNSTGDFDLHLLKVSEGTTILLNCTGQVKGRK
PAALGEAQPTKSLEENKSLKEQKKLNDLCFLKRLLQEIKTCWNKILMGTK
EH.

[0706] In some embodiments of these multi-chain chimeric polypeptides, the soluble human IL-7 is encoded by a sequence that is at least 80% identical (e.g., at least 82% identical, at least 84% identical, at least 86% identical, at least 88% identical, at least 90% identical, at least 92% identical, at least 94% identical, at least 96% identical, at least 98% identical, at least 99% identical, or 100% identical) to:

(SEQ ID NO: 198)
GATTGTGATATTGAAGGTAAAGATGGCAAACAATATGAGAGTGTTCTAAT
GGTCAGCATCGATCAATTATTGGACAGCATGAAAGAAATTGGTAGCAATT
GCCTGAATAATGAATTTAACTTTTTTAAAAGACATATCTGTGATGCTAAT
AAGGAAGGTATGTTTTTATTCCGTGCTGCTCGCAAGTTGAGGCAATTTCT
TAAAATGAATAGCACTGGTGATTTTGATCTCCACTTATTAAAAGTTTCAG
AAGGCACAACAATACTGTTGAACTGCACTGGCCAGGTTAAAGGAAGAAAA
CCAGCTGCCCTGGGTGAAGCCCAACCAACAAAGAGTTTGGAAGAAAATAA
ATCTTTAAAGGAACAGAAAAAACTGAATGACTTGTGTTTCCTAAAGAGAC
TATTACAAGAGATAAAAACTTGTTGGAATAAAATTTTGATGGGCACTAAA
GAACAC.

[0707] In some embodiments of these multi-chain chimeric polypeptides, the soluble human IL-7 is encoded by a sequence that is at least 80% identical (e.g., at least 82% identical, at least 84% identical, at least 86% identical, at least 88% identical, at least 90% identical, at least 92% identical, at least 94% identical, at least 96% identical, at least 98% identical, at least 99% identical, or 100% identical) to:

(SEQ ID NO: 227)
GATTGCGACATCGAGGGCAAGGACGGCAAGCAGTACGAGAGCGTGCTGAT
GGTGTCCATCGACCAGCTGCTGGACAGCATGAAGGAGATCGGCTCCAACT
GCCTCAACAACGAGTTCAACTTCTTCAAGCGGCACATCTGCGACGCCAAC
AAGGAGGGCATGTTCCTGTTCAGGGCCGCCAGGAAACTGCGGCAGTTCCT
GAAGATGAACTCCACCGGCGACTTCGACCTGCACCTGCTGAAGGTGTCCG
AGGGCACCACCATCCTGCTGAACTGCACCGGACAGGTGAAGGGCCGGAAA
CCTGCTGCTCTGGGAGAGGCCCAACCCACCAAGAGCCTGGAGGAGAACAA
GTCCCTGAAGGAGCAGAAGAAGCTGAACGACCTGTGCTTCCTGAAGAGGC
TGCTGCAGGAGATCAAGACCTGCTGGAACAAGATCCTGATGGGCACCAAG
GAGCAT.

[0708] In some embodiments of these multi-chain chimeric polypeptides, the sequence of soluble human IL-21 comprises a sequence that is at least 80% identical (e.g., at least 82% identical, at least 84% identical, at least 86% identical, at least 88% identical, at least 90% identical, at least 92% identical, at least 94% identical, at least 96% identical, at least 98% identical, at least 99% identical, or 100% identical) to:

(SEQ ID NO: 83)
[sequence omitted]

[0709] In some embodiments of these multi-chain chimeric polypeptides, the soluble human IL-21 is encoded by a sequence that is at least 80% identical (e.g., at least 82% identical, at least 84% identical, at least 86% identical, at least 88% identical, at least 90% identical, at least 92% identical, at least 94% identical, at least 96% identical, at least 98% identical, at least 99% identical, or 100% identical) to:

(SEQ ID NO: 197)
CAAGGTCAAGATCGCCACATGATTAGAATGCGTCAACTTATAGATATTGT
TGATCAGCTGAAAAATTATGTGAATGACTTGGTCCCTGAATTTCTGCCAG
CTCCAGAAGATGTAGAGACAAACTGTGAGTGGTCAGCTTTTTCCTGTTTT
CAGAAGGCCCAACTAAAGTCAGCAAATACAGGAAACAATGAAAGGATAAT
CAATGTATCAATTAAAAAGCTGAAGAGGAAACCACCTTCCACAAATGCAG
GGAGAAGACAGAAACACAGACTAACATGCCCTTCATGTGATTCTTATGAG
AAAAAACCACCCAAAGAATTCCTAGAAAGATTCAAATCACTTCTCCAAAA
GATGATTCATCAGCATCTGTCCTCTAGAACACACGGAAGTGAAGATTCC.

[0710] In some embodiments of these multi-chain chimeric polypeptides, the soluble human IL-21 is encoded by a sequence that is at least 80% identical (e.g., at least 82% identical, at least 84% identical, at least 86% identical, at least 88% identical, at least 90% identical, at least 92% identical, at least 94% identical, at least 96% identical, at least 98% identical, at least 99% identical, or 100% identical) to:

(SEQ ID NO: 182)
CAGGGCCAGGACAGGCACATGATCCGGATGAGGCAGCTCATCGACATCGT
CGACCAGCTGAAGAACTACGTGAACGACCTGGTGCCCGAGTTTCTGCCTG
CCCCCGAGGACGTGGAGACCAACTGCGAGTGGTCCGCCTTCTCCTGCTTT
CAGAAGGCCCAGCTGAAGTCCGCCAACACCGGCAACAACGAGCGGATCAT
CAACGTGAGCATCAAGAAGCTGAAGCGGAAGCCTCCCTCCACAAACGCCG
GCAGGAGGCAGAAGCACAGGCTGACCTGCCCCAGCTGTGACTCCTACGAG
AAGAAGCCCCCCAAGGAGTTCCTGGAGAGGTTCAAGTCCCTGCTGCAGAA
GATGATCCATCAGCACCTGTCCTCCAGGACCCACGGCTCCGAGGACTCC

[0711] In some embodiments of these multi-chain chimeric polypeptides, the additional target-binding domain includes an scFv that specifically binds to CD16 (e.g., an anti-CD16 scFv).

[0712] In some embodiments of these multi-chain chimeric polypeptides, the scFv that binds specifically to CD16 includes a light chain variable domain that includes a sequence that is at least 80% identical (e.g., at least 82% identical, at least 84% identical, at least 86% identical, at least 88% identical, at least 90% identical, at least 92% identical, at least 94% identical, at least 96% identical, at least 98% identical, at least 99% identical, or 100% identical) to:

(SEQ ID NO: 215)
SELTQDPAVSVALGQTVRITCQGDSLRSYYASWYQQKPGQAPVLVIYGKN
NRPSGIPDRFSGSSSGNTASLTITGAQAEDEADYYCNSRDSSGNHVVFGG
GTKLTVGH.

[0713] In some embodiments of these multi-chain chimeric polypeptides, the scFv that binds specifically to CD16 is encoded by a light chain variable domain sequence that is at least 80% identical (e.g., at least 82% identical, at least 84% identical, at least 86% identical, at least 88% identical, at least 90% identical, at least 92% identical, at least 94% identical, at least 96% identical, at least 98% identical, at least 99% identical, or 100% identical) to:

(SEQ ID NO: 216)
TCCGAGCTGACCCAGGACCCTGCTGTGTCCGTGGCTCTGGGCCAGACCGT
GAGGATCACCTGCCAGGGCGACTCCCTGAGGTCCTACTACGCCTCCTGGT
ACCAGCAGAAGCCCGGCCAGGCTCCTGTGCTGGTGATCTACGGCAAGAAC
AACAGGCCCTCCGGCATCCCTGACAGGTTCTCCGGATCCTCCTCCGGCAA
CACCGCCTCCCTGACCATCACAGGCGCTCAGGCCGAGGACGAGGCTGACT
ACTACTGCAACTCCAGGGACTCCTCCGGCAACCATGTGGTGTTCGGCGGC
GGCACCAAGCTGACCGTGGGCCAT.

[0714] In some embodiments of these multi-chain chimeric polypeptides, the scFv that binds specifically to CD16 includes a heavy chain variable domain that includes a sequence that is at least 80% identical (e.g., at least 82% identical, at least 84% identical, at least 86% identical, at least 88% identical, at least 90% identical, at least 92% identical, at least 94% identical, at least 96% identical, at least 98% identical, at least 99% identical, or 100% identical) to:

(SEQ ID NO: 217)
EVQLVESGGGVVRPGGSLRLSCAASGFTFDDYGMSWVRQAPGKGLEWVSG
INWNGGSTGYADSVKGRFTISRDNAKNSLYLQMNSLRAEDTAVYYCARGR
SLLFDYWGQGTLVTVSR.

[0715] In some embodiments of these multi-chain chimeric polypeptides, the scFv that binds specifically to CD16 is encoded by a heavy chain variable domain sequence that is at least 80% identical (e.g., at least 82% identical, at least 84% identical, at least 86% identical, at least 88% identical, at least 90% identical, at least 92% identical, at least 94% identical, at least 96% identical, at least 98% identical, at least 99% identical, or 100% identical) to:

(SEQ ID NO: 218)
GAGGTGCAGCTGGTGGAGTCCGGAGGAGGAGTGGTGAGGCCTGGAGGCTC
CCTGAGGCTGAGCTGTGCTGCCTCCGGCTTCACCTTCGACGACTACGGCA
TGTCCTGGGTGAGGCAGGCTCCTGGAAAGGGCCTGGAGTGGGTGTCCGGC
ATCAACTGGAACGGCGGATCCACCGGCTACGCCGATTCCGTGAAGGGCAG
GTTCACCATCAGCAGGGACAACGCCAAGAACTCCCTGTACCTGCAGATGA
ACTCCCTGAGGGCCGAGGACACCGCCGTGTACTACTGCGCCAGGGGCAGG
TCCCTGCTGTTCGACTACTGGGGACAGGGCACCCTGGTGACCGTGTCCAG
G.

[0716] In some embodiments, the first chimeric polypeptide can include a sequence that is at least 80% identical (e.g., at least 82% identical, at least 84% identical, at least 86% identical, at least 88% identical, at least 90% identical, at least 92% identical, at least 94% identical, at least 96% identical, at least 98% identical, at least 99% identical, or 100% identical) to:

(SEQ ID NO: 207)
DCDIEGKDGKQYESVLMVSIDQLLDSMKEIGSNCLNNEFNEFKRHICDAN
KEGMFLFRAARKLRQFLKMNSTGDFDLHLLKVSEGTTILLNCTGQVKGRK
PAALGEAQPTKSLEENKSLKEQKKLNDLCFLKRLLQEIKTCWNKILMGTK
EHSGTTNTVAAYNLTWKSTNFKTILEWEPKPVNQVYTVQISTKSGDWKSK
CFYTTDTECDLTDEIVKDVKQTYLARVFSYPAGNVESTGSAGEPLYENSP
EFTPYLETNLGQPTIQSFEQVGTKVNVTVEDERTLVRRNNTFLSLRDVFG
KDLIYTLYYWKSSSSGKKTAKTNTNEFLIDVDKGENYCFSVQAVIPSRTV
NRKSTDSPVECMGQEKGEFRENWVNVISDLKKIEDLIQSMHIDATLYTES
DVHPSCKVTAMKCFLLELQVISLESGDASIHDTVENLIILANNSLSSNGN
VTESGCKECEELEEKNIKEFLQSFVHIVQMFINTS.

[0717] In some embodiments, a first chimeric polypeptide is encoded by a sequence that is at least 80% identical (e.g., at least 82% identical, at least 84% identical, at least 86% identical, at least 88% identical, at least 90% identical, at least 92% identical, at least 94% identical, at least 96% identical, at least 98% identical, at least 99% identical, or 100% identical) to:

(SEQ ID NO: 208)
GATTGCGACATCGAGGGCAAGGACGGCAAGCAGTACGAGAGCGTGCTGAT
GGTGTCCATCGACCAGCTGCTGGACAGCATGAAGGAGATCGGCTCCAACT
GCCTCAACAACGAGTTCAACTTCTTCAAGCGGCACATCTGCGACGCCAAC
AAGGAGGGCATGTTCCTGTTCAGGGCCGCCAGGAAACTGCGGCAGTTCCT
GAAGATGAACTCCACCGGCGACTTCGACCTGCACCTGCTGAAGGTGTCCG
AGGGCACCACCATCCTGCTGAACTGCACCGGACAGGTGAAGGGCCGGAAA
CCTGCTGCTCTGGGAGAGGCCCAACCCACCAAGAGCCTGGAGGAGAACAA
GTCCCTGAAGGAGCAGAAGAAGCTGAACGACCTGTGCTTCCTGAAGAGGC
TGCTGCAGGAGATCAAGACCTGCTGGAACAAGATCCTGATGGGCACCAAG
GAGCATAGCGGCACAACCAACACAGTCGCTGCCTATAACCTCACTTGGAA
GAGCACCAACTTCAAAACCATCCTCGAATGGGAACCCAAACCCGTTAACC
AAGTTTACACCGTGCAGATCAGCACCAAGTCCGGCGACTGGAAGTCCAAA
TGTTTCTATACCACCGACACCGAGTGCGATCTCACCGATGAGATCGTGAA
AGATGTGAAACAGACCTACCTCGCCCGGGTGTTTAGCTACCCCGCCGGCA
ATGTGGAGAGCACTGGTTCCGCTGGCGAGCCTTTATACGAGAACAGCCCC
GAATTTACCCCTTACCTCGAGACCAATTTAGGACAGCCCACCATCCAAAG
CTTTGAGCAAGTTGGCACAAAGGTGAATGTGACAGTGGAGGACGAGCGGA
CTTTAGTGCGGCGGAACAACACCTTTCTCAGCCTCCGGGATGTGTTCGGC
AAAGATTTAATCTACACACTGTATTACTGGAAGTCCTCTTCCTCCGGCAA
GAAGACAGCTAAAACCAACACAAACGAGTTTTTAATCGACGTGGATAAAG
GCGAAAACTACTGTTTCAGCGTGCAAGCTGTGATCCCCTCCCGGACCGTG
AATAGGAAAAGCACCGATAGCCCCGTTGAGTGCATGGGCCAAGAAAAGGG
CGAGTTCCGGGAGAACTGGGTGAACGTCATCAGCGATTTAAAGAAGATCG
AAGATTTAATTCAGTCCATGCATATCGACGCCACTTTATACACAGAATCC
GACGTGCACCCCTCTTGTAAGGTGACCGCCATGAAATGTTTTTTACTGGA
GCTGCAAGTTATCTCTTTAGAGAGCGGAGACGCTAGCATCCACGACACCG
TGGAGAATTTAATCATTTTAGCCAATAACTCTTTATCCAGCAACGGCAAC
GTGACAGAGTCCGGCTGCAAGGAGTGCGAAGAGCTGGAGGAGAAGAACAT
CAAGGAGTTTCTGCAATCCTTTGTGCACATTGTCCAGATGTTCATCAATA
CCTCC.

[0718] In some embodiments, a first chimeric polypeptide can include a sequence that is at least 80% identical (e.g., at least 82% identical, at least 84% identical, at least 86% identical, at least 88% identical, at least 90% identical, at least 92% identical, at least 94% identical, at least 96% identical, at least 98% identical, at least 99% identical, or 100% identical) to:

(SEQ ID NO: 209)
MKWVTFISLLFLFSSAYSDCDIEGKDGKQYESVLMVSIDQLLDSMKEIGS
NCLNNEFNFFKRHICDANKEGMFLFRAARKLRQFLKMNSTGDFDLHLLKV
SEGTTILLNCTGQVKGRKPAALGEAQPTKSLEENKSLKEQKKLNDLCFLK
RLLQEIKTCWNKILMGTKEHSGTTNTVAAYNLTWKSTNFKTILEWEPKPV
NQVYTVQISTKSGDWKSKCFYTTDTECDLTDEIVKDVKQTYLARVFSYPA
GNVESTGSAGEPLYENSPEFTPYLETNLGQPTIQSFEQVGTKVNVTVEDE
RTLVRRNNTFLSLRDVFGKDLIYTLYYWKSSSSGKKTAKTNTNEFLIDVD
KGENYCFSVQAVIPSRTVNRKSTDSPVECMGQEKGEFRENWVNVISDLKK
IEDLIQSMHIDATLYTESDVHPSCKVTAMKCFLLELQVISLESGDASIHD
TVENLIILANNSLSSNGNVTESGCKECEELEEKNIKEFLQSFVHIVQMFI
NTS.

[0719] In some embodiments, a first chimeric polypeptide is encoded by a sequence that is at least 80% identical (e.g., at least 82% identical, at least 84% identical, at least 86% identical, at least 88% identical, at least 90% identical, at least 92% identical, at least 94% identical, at least 96% identical, at least 98% identical, at least 99% identical, or 100% identical) to:

(SEQ ID NO: 210)
ATGAAGTGGGTGACCTTCATCAGCCTGCTGTTCCTGTTCTCCAGCGCCTA
CTCCGATTGCGACATCGAGGGCAAGGACGGCAAGCAGTACGAGAGCGTGC
TGATGGTGTCCATCGACCAGCTGCTGGACAGCATGAAGGAGATCGGCTCC
AACTGCCTCAACAACGAGTTCAACTTCTTCAAGCGGCACATCTGCGACGC
CAACAAGGAGGGCATGTTCCTGTTCAGGGCCGCCAGGAAACTGCGGCAGT
TCCTGAAGATGAACTCCACCGGCGACTTCGACCTGCACCTGCTGAAGGTG
TCCGAGGGCACCACCATCCTGCTGAACTGCACCGGACAGGTGAAGGGCCG
GAAACCTGCTGCTCTGGGAGAGGCCCAACCCACCAAGAGCCTGGAGGAGA
ACAAGTCCCTGAAGGAGCAGAAGAAGCTGAACGACCTGTGCTTCCTGAAG
AGGCTGCTGCAGGAGATCAAGACCTGCTGGAACAAGATCCTGATGGGCAC
CAAGGAGCATAGCGGCACAACCAACACAGTCGCTGCCTATAACCTCACTT
GGAAGAGCACCAACTTCAAAACCATCCTCGAATGGGAACCCAAACCCGTT
AACCAAGTTTACACCGTGCAGATCAGCACCAAGTCCGGCGACTGGAAGTC
CAAATGTTTCTATACCACCGACACCGAGTGCGATCTCACCGATGAGATCG
TGAAAGATGTGAAACAGACCTACCTCGCCCGGGTGTTTAGCTACCCCGCC
GGCAATGTGGAGAGCACTGGTTCCGCTGGCGAGCCTTTATACGAGAACAG
CCCCGAATTTACCCCTTACCTCGAGACCAATTTAGGACAGCCCACCATCC
AAAGCTTTGAGCAAGTTGGCACAAAGGTGAATGTGACAGTGGAGGACGAG
CGGACTTTAGTGCGGCGGAACAACACCTTTCTCAGCCTCCGGGATGTGTT
CGGCAAAGATTTAATCTACACACTGTATTACTGGAAGTCCTCTTCCTCCG
GCAAGAAGACAGCTAAAACCAACACAAACGAGTTTTTAATCGACGTGGAT
AAAGGCGAAAACTACTGTTTCAGCGTGCAAGCTGTGATCCCCTCCCGGAC
CGTGAATAGGAAAAGCACCGATAGCCCCGTTGAGTGCATGGGCCAAGAAA
AGGGCGAGTTCCGGGAGAACTGGGTGAACGTCATCAGCGATTTAAAGAAG
ATCGAAGATTTAATTCAGTCCATGCATATCGACGCCACTTTATACACAGA
ATCCGACGTGCACCCCTCTTGTAAGGTGACCGCCATGAAATGTTTTTTAC
TGGAGCTGCAAGTTATCTCTTTAGAGAGCGGAGACGCTAGCATCCACGAC
ACCGTGGAGAATTTAATCATTTTAGCCAATAACTCTTTATCCAGCAACGG
CAACGTGACAGAGTCCGGCTGCAAGGAGTGCGAAGAGCTGGAGGAGAAGA
ACATCAAGGAGTTTCTGCAATCCTTTGTGCACATTGTCCAGATGTTCATC
AATACCTCC.

[0720] In some embodiments, the second chimeric polypeptide can include a sequence that is at least 80% identical (e.g., at least 82% identical, at least 84% identical, at least 86% identical, at least 88% identical, at least 90% identical, at least 92% identical, at least 94% identical, at least 96% identical, at least 98% identical, at least 99% identical, or 100% identical) to:

(SEQ ID NO: 232)
SELTQDPAVSVALGQTVRITCQGDSLRSYYASWYQQKPGQAPVLVIYGKN
NRPSGIPDRFSGSSSGNTASLTITGAQAEDEADYYCNSRDSSGNHVVFGG
GTKLTVGHGGGGSGGGGSGGGGSEVQLVESGGGVVRPGGSLRLSCAASGF
TFDDYGMSWVRQAPGKGLEWVSGINWNGGSTGYADSVKGRFTISRDNAKN
SLYLQMNSLRAEDTAVYYCARGRSLLFDYWGQGTLVTVSRITCPPPMSVE
HADIWVKSYSLYSRERYICNSGFKRKAGTSSLTECVLNKATNVAHWTTPS
LKCIRQGQDRHMIRMRQLIDIVDQLKNYVNDLVPEFLPAPEDVETNCEWS
AFSCFQKAQLKSANTGNNERIINVSIKKLKRKPPSTNAGRRQKHRLTCPS
CDSYEKKPPKEFLERFKSLLQKMIHQHLSSRTHGSEDS.

[0721] In some embodiments, a second chimeric polypeptide is encoded by a sequence that is at least 80% identical (e.g., at least 82% identical, at least 84% identical, at least 86% identical, at least 88% identical, at least 90% identical, at least 92% identical, at least 94% identical, at least 96% identical, at least 98% identical, at least 99% identical, or 100% identical) to:

(SEQ ID NO: 233)
TCCGAGCTGACCCAGGACCCTGCTGTGTCCGTGGCTCTGGGCCAGACCGT
GAGGATCACCTGCCAGGGCGACTCCCTGAGGTCCTACTACGCCTCCTGGT
ACCAGCAGAAGCCCGGCCAGGCTCCTGTGCTGGTGATCTACGGCAAGAAC
AACAGGCCCTCCGGCATCCCTGACAGGTTCTCCGGATCCTCCTCCGGCAA
CACCGCCTCCCTGACCATCACAGGCGCTCAGGCCGAGGACGAGGCTGACT
ACTACTGCAACTCCAGGGACTCCTCCGGCAACCATGTGGTGTTCGGCGGC
GGCACCAAGCTGACCGTGGGCCATGGCGGCGGCGGCTCCGGAGGCGGCGG
CAGCGGCGGAGGAGGATCCGAGGTGCAGCTGGTGGAGTCCGGAGGAGGAG
TGGTGAGGCCTGGAGGCTCCCTGAGGCTGAGCTGTGCTGCCTCCGGCTTC
ACCTTCGACGACTACGGCATGTCCTGGGTGAGGCAGGCTCCTGGAAAGGG
CCTGGAGTGGGTGTCCGGCATCAACTGGAACGGCGGATCCACCGGCTACG
CCGATTCCGTGAAGGGCAGGTTCACCATCAGCAGGGACAACGCCAAGAAC
TCCCTGTACCTGCAGATGAACTCCCTGAGGGCCGAGGACACCGCCGTGTA
CTACTGCGCCAGGGGCAGGTCCCTGCTGTTCGACTACTGGGGACAGGGCA
CCCTGGTGACCGTGTCCAGGATTACATGCCCCCCTCCCATGAGCGTGGAG
CACGCCGACATCTGGGTGAAGAGCTATAGCCTCTACAGCCGGGAGAGGTA
TATCTGTAACAGCGGCTTCAAGAGGAAGGCCGGCACCAGCAGCCTCACCG
AGTGCGTGCTGAATAAGGCTACCAACGTGGCTCACTGGACAACACCCTCT
TTAAAGTGCATCCGGCAGGGCCAGGACAGGCACATGATCCGGATGAGGCA
GCTCATCGACATCGTCGACCAGCTGAAGAACTACGTGAACGACCTGGTGC
CCGAGTTTCTGCCTGCCCCCGAGGACGTGGAGACCAACTGCGAGTGGTCC
GCCTTCTCCTGCTTTCAGAAGGCCCAGCTGAAGTCCGCCAACACCGGCAA
CAACGAGCGGATCATCAACGTGAGCATCAAGAAGCTGAAGCGGAAGCCTC
CCTCCACAAACGCCGGCAGGAGGCAGAAGCACAGGCTGACCTGCCCCAGC
TGTGACTCCTACGAGAAGAAGCCCCCCAAGGAGTTCCTGGAGAGGTTCAA
GTCCCTGCTGCAGAAGATGATCCATCAGCACCTGTCCTCCAGGACCCACG
GCTCCGAGGACTCC.

[0722] In some embodiments, a second chimeric polypeptide can include a sequence that is at least 80% identical (e.g., at least 82% identical, at least 84% identical, at least 86% identical, at least 88% identical, at least 90% identical, at least 92% identical, at least 94% identical, at least 96% identical, at least 98% identical, at least 99% identical, or 100% identical) to:

(SEQ ID NO: 234)
MKWVTFISLLFLFSSAYSSELTQDPAVSVALGQTVRITCQGDSLRSYYAS
WYQQKPGQAPVLVIYGKNNRPSGIPDRFSGSSSGNTASLTITGAQAEDEA
DYYCNSRDSSGNHVVFGGGTKLTVGHGGGGSGGGGSGGGGSEVQLVESGG
GVVRPGGSLRLSCAASGFTFDDYGMSWVRQAPGKGLEWVSGINWNGGSTG
YADSVKGRFTISRDNAKNSLYLQMNSLRAEDTAVYYCARGRSLLFDYWGQ
GTLVTVSRITCPPPMSVEHADIWVKSYSLYSRERYICNSGFKRKAGTSSL
TECVLNKATNVAHWTTPSLKCIRQGQDRHMIRMRQLIDIVDQLKNYVNDL
VPEFLPAPEDVETNCEWSAFSCFQKAQLKSANTGNNERIINVSIKKLKRK
PPSTNAGRRQKHRLTCPSCDSYEKKPPKEFLERFKSLLQKMIHQHLSSRT
HGSEDS.

[0723] In some embodiments, a second chimeric polypeptide is encoded by a sequence that is at least 80% identical (e.g., at least 82% identical, at least 84% identical, at least 86% identical, at least 88% identical, at least 90% identical, at least 92% identical, at least 94% identical, at least 96% identical, at least 98% identical, at least 99% identical, or 100% identical) to:

(SEQ ID NO: 235)
ATGAAGTGGGTGACCTTCATCAGCCTGCTGTTCCTGTTCTCCAGCGCCTA
CTCCTCCGAGCTGACCCAGGACCCTGCTGTGTCCGTGGCTCTGGGCCAGA
CCGTGAGGATCACCTGCCAGGGCGACTCCCTGAGGTCCTACTACGCCTCC
TGGTACCAGCAGAAGCCCGGCCAGGCTCCTGTGCTGGTGATCTACGGCAA
GAACAACAGGCCCTCCGGCATCCCTGACAGGTTCTCCGGATCCTCCTCCG
GCAACACCGCCTCCCTGACCATCACAGGCGCTCAGGCCGAGGACGAGGCT
GACTACTACTGCAACTCCAGGGACTCCTCCGGCAACCATGTGGTGTTCGG
CGGCGGCACCAAGCTGACCGTGGGCCATGGCGGCGGCGGCTCCGGAGGCG
GCGGCAGCGGCGGAGGAGGATCCGAGGTGCAGCTGGTGGAGTCCGGAGGA
GGAGTGGTGAGGCCTGGAGGCTCCCTGAGGCTGAGCTGTGCTGCCTCCGG
CTTCACCTTCGACGACTACGGCATGTCCTGGGTGAGGCAGGCTCCTGGAA
AGGGCCTGGAGTGGGTGTCCGGCATCAACTGGAACGGCGGATCCACCGGC
TACGCCGATTCCGTGAAGGGCAGGTTCACCATCAGCAGGGACAACGCCAA
GAACTCCCTGTACCTGCAGATGAACTCCCTGAGGGCCGAGGACACCGCCG
TGTACTACTGCGCCAGGGGCAGGTCCCTGCTGTTCGACTACTGGGGACAG
GGCACCCTGGTGACCGTGTCCAGGATTACATGCCCCCCTCCCATGAGCGT
GGAGCACGCCGACATCTGGGTGAAGAGCTATAGCCTCTACAGCCGGGAGA
GGTATATCTGTAACAGCGGCTTCAAGAGGAAGGCCGGCACCAGCAGCCTC
ACCGAGTGCGTGCTGAATAAGGCTACCAACGTGGCTCACTGGACAACACC
CTCTTTAAAGTGCATCCGGCAGGGCCAGGACAGGCACATGATCCGGATGA
GGCAGCTCATCGACATCGTCGACCAGCTGAAGAACTACGTGAACGACCTG
GTGCCCGAGTTTCTGCCTGCCCCCGAGGACGTGGAGACCAACTGCGAGTG
GTCCGCCTTCTCCTGCTTTCAGAAGGCCCAGCTGAAGTCCGCCAACACCG
GCAACAACGAGCGGATCATCAACGTGAGCATCAAGAAGCTGAAGCGGAAG
CCTCCCTCCACAAACGCCGGCAGGAGGCAGAAGCACAGGCTGACCTGCCC
CAGCTGTGACTCCTACGAGAAGAAGCCCCCCAAGGAGTTCCTGGAGAGGT
TCAAGTCCCTGCTGCAGAAGATGATCCATCAGCACCTGTCCTCCAGGACC
CACGGCTCCGAGGACTCC.

### Exemplary Multi-Chain Chimeric Polypeptides—Type G

[0724] In some embodiments of any of the multi-chain chimeric polypeptides described herein, the first target-binding domain and the second targeting-binding domain each independently bind specifically to TGFβ (e.g., a human TGFβRII receptor), CD16 (e.g., an anti-CD16 scFv), or a receptor for IL-21 (e.g., a soluble human IL-21). In some embodiments of these multi-chain chimeric polypeptides described herein, the first chimeric polypeptide further includes the additional target-binding domain. In some embodiments of these multi-chain chimeric polypeptides described herein, the second chimeric polypeptide further includes the additional target-binding domain. In some embodiments of these multi-chain chimeric polypeptides described herein, the additional target-binding domain binds specifically to CD16 or a receptor for IL-21.

[0725] In some examples of these multi-chain chimeric polypeptides, the first target-binding domain and the soluble tissue factor domain directly abut each other in the first chimeric polypeptide. In some examples of these multi-chain chimeric polypeptides, the first chimeric polypeptide further comprises a linker sequence (e.g., any of the exemplary linkers described herein) between the first target-binding domain and the soluble tissue factor domain in the first chimeric polypeptide.

[0726] In some embodiments of these multi-chain chimeric polypeptides, the soluble tissue factor domain and the first domain of the pair of affinity domains directly abut each other in the first chimeric polypeptide. In some embodiments of these multi-chain chimeric polypeptides, the first chimeric polypeptide further includes a linker sequence (e.g., any of the exemplary linkers described herein) between the soluble tissue factor domain and the first domain of the pair of affinity domains in the first chimeric polypeptide.

[0727] In some embodiments of these multi-chain chimeric polypeptides, the second domain of the pair of affinity domains and the second target-binding domain directly abut each other in the second chimeric polypeptide. In some embodiments of these multi-chain chimeric polypeptides, the second chimeric polypeptide further includes a linker sequence (e.g., any of the exemplary linkers described herein) between the second domain of the pair of affinity domains and the second target-binding domain in the second chimeric polypeptide.

[0728] In some embodiments, the second chimeric polypeptide further comprises one or more additional target-binding domains at the N-terminal end or the C-terminal end of the second chimeric polypeptide.

[0729] In some embodiments of these multi-chain chimeric polypeptides, the additional target-binding domain and the second domain of the pair of affinity domains directly abut each other in the second chimeric polypeptide. In some embodiments of these multi-chain chimeric polypeptides, the second chimeric polypeptide further includes a linker sequence (e.g., any of the exemplary linkers described herein) between the second domain of the pair of affinity domains and the additional target-binding domain in the second chimeric polypeptide.

[0730] In some embodiments of these multi-chain chimeric polypeptides, the additional target-binding domain and the second target-binding domain directly abut each other in the second chimeric polypeptide. In some embodiments of these multi-chain chimeric polypeptides, the second chimeric polypeptide further includes a linker sequence (e.g., any of the exemplary linkers described herein) between the second target-binding domain and the additional target-binding domain in the second chimeric polypeptide.

[0731] In some embodiments of these multi-chain chimeric polypeptides, the soluble tissue factor domain can be any of the exemplary soluble tissue factor domains described herein. In some embodiments of these multi-chain chimeric polypeptides, the pair of affinity domains can be any of the exemplary pairs of affinity domains described herein.

[0732] In some embodiments of these multi-chain chimeric polypeptides, one or more of the first target-binding domain, the second target-binding domain and the additional antigen-binding domain is an agonistic antigen-binding domain. In some embodiments of these multi-chain chimeric polypeptides, the first target-binding domain, the second target-binding domain, and the additional antigen-binding domain are each agonistic antigen-binding domains. In some embodiments of these multi-chain chimeric polypeptides, the antigen-binding domain includes a scFv or single-domain antibody.

[0733] In some embodiments of any of the multi-chain chimeric polypeptides described herein, the first target-binding domain and the second targeting-binding domain each independently bind specifically to TGF-β, CD16, or a receptor for IL-21. In some embodiments of any of the multi-chain chimeric polypeptides described herein, the first target-binding domain binds specifically to a TGF-β and the second target-binding domain binds specifically to CD16 or a receptor of IL-21. In some embodiments of any of the multi-chain chimeric polypeptides described herein, the first target-binding domain is a soluble TGF-β receptor. In some embodiments of any of the multi-chain chimeric polypeptides described herein, soluble TGF-β receptor is a soluble TGFβRII receptor. In some embodiments of any of the multi-chain chimeric polypeptides described herein, the second target-binding domain binds specifically to CD16. In some embodiments of any of the multi-chain chimeric polypeptides described herein, the second antigen-binding domain includes an antigen-binding domain that binds specifically to CD16. In some embodiments of any of the multi-chain chimeric polypeptides described herein, the second antigen-binding domain includes an scFv that binds specifically to CD16. In some embodiments of any of the multi-chain chimeric polypeptides described herein, the second target-binding domain binds specifically to a receptor for IL-21. In some embodiments of any of the multi-chain chimeric polypeptides described herein, the second target-binding domain includes a soluble IL-21. In some embodiments of any of the multi-chain chimeric polypeptides described herein, the second target-binding domain includes a soluble human IL-21. In some embodiments of any of the multi-chain chimeric polypeptides described herein, the second chimeric polypeptide further includes an additional target-binding domain that binds specifically to a receptor for IL-21. In some embodiments of any of the multi-chain chimeric polypeptides described herein, the additional target-binding domain includes a soluble IL-21. In some embodiments of any of the multi-chain chimeric polypeptides described herein, the soluble IL-21 is a soluble human IL-21. In some embodiments of any of the multi-chain chimeric polypeptides described herein, the second chimeric polypeptide further includes an additional target-binding domain that binds specifically to CD16.

[0734] In some embodiments of these multi-chain chimeric polypeptides, two or more of the first target-binding domain, the second target-binding domain, and the one or more additional target-binding domains bind specifically to the same antigen. In some embodiments, two or more of the first target-binding domain, the second target-binding domain, and the one or more additional target-binding domains bind specifically to the same epitope. In some embodiments, two or more of the first target-binding domain, the second target-binding domain, and the one or more additional target-binding domains comprise the same amino acid sequence.

[0735] In some embodiments of these multi-chain chimeric polypeptides, the first target-binding domain includes a TGFβRII receptor (e.g., a soluble human TGFβRII receptor). In some embodiments of these multi-chain chimeric polypeptides, the soluble human TGFRβRII includes a first sequence of soluble human TGFRβRII and a second sequence of soluble human TGFRβRII. In some embodiments of these multi-chain chimeric polypeptides, the soluble human TGFRβRII includes a linker disposed between the first sequence of soluble human TGFRβRII and the second sequence of soluble human TGFRβRII. In some examples of these multi-chain chimeric polypeptides, the linker includes the sequence GGGGSGGGGSGGGGS (SEQ ID NO: 102).

[0736] In some embodiments of these multi-chain chimeric polypeptides, the first sequence of soluble human TGFRβRII receptor comprises a sequence that is at least 80% identical (e.g., at least 82% identical, at least 84% identical, at least 86% identical, at least 88% identical, at least 90% identical, at least 92% identical, at least 94% identical, at least 96% identical, at least 98% identical, at least 99% identical, or 100% identical) to:

(SEQ ID NO: 183)
IPPHVQKSVNNDMIVTDNNGAVKFPQLCKFCDVRFSTCDNQKSCMSNCSI
TSICEKPQEVCVAVWRKNDENITLETVCHDPKLPYHDFILEDAASPKCIM
KEKKKPGETFFMCSCSSDECNDNIIFSEEYNTSNPD.

[0737] In some embodiments of these multi-chain chimeric polypeptides, the second sequence of soluble human TGFRβRII receptor comprises a sequence that is at least 80% identical (e.g., at least 82% identical, at least 84% identical, at least 86% identical, at least 88% identical, at least 90% identical, at least 92% identical, at least 94% identical, at least 96% identical, at least 98% identical, at least 99% identical, or 100% identical) to:

(SEQ ID NO: 184)
IPPHVQKSVNNDMIVTDNNGAVKFPQLCKFCDVRFSTCDNQKSCMSNCSI
TSICEKPQEVCVAVWRKNDENITLETVCHDPKLPYHDFILEDAASPKCIM
KEKKKPGETFFMCSCSSDECNDNIIFSEEYNTSNPD.

[0738] In some embodiments of these multi-chain chimeric polypeptides, the first sequence of soluble human TGFRβRII receptor is encoded by a sequence that is at least 80% identical (e.g., at least 82% identical, at least 84% identical, at least 86% identical, at least 88% identical, at least 90% identical, at least 92% identical, at least 94% identical, at least 96% identical, at least 98% identical, at least 99% identical, or 100% identical) to:

(SEQ ID NO: 185)
ATCCCCCCCCATGTGCAAAAGAGCGTGAACAACGATATGATCGTGACCGA
CAACAACGGCGCCGTGAAGTTTCCCCAGCTCTGCAAGTTCTGCGATGTCA
GGTTCAGCACCTGCGATAATCAGAAGTCCTGCATGTCCAACTGCAGCATC
ACCTCCATCTGCGAGAAGCCCCAAGAAGTGTGCGTGGCCGTGTGGCGGAA
AAATGACGAGAACATCACCCTGGAGACCGTGTGTCACGACCCCAAGCTCC
CTTATCACGACTTCATTCTGGAGGACGCTGCCTCCCCCAAATGCATCATG
AAGGAGAAGAAGAAGCCCGGAGAGACCTTCTTTATGTGTTCCTGTAGCAG
CGACGAGTGTAACGACAACATCATCTTCAGCGAAGAGTACAACACCAGCA
ACCCTGAT

[0739] In some embodiments of these multi-chain chimeric polypeptides, the second sequence of soluble human TGFRβRII receptor is encoded by a sequence that is at least 80% identical (e.g., at least 82% identical, at least 84% identical, at least 86% identical, at least 88% identical, at least 90% identical, at least 92% identical, at least 94% identical, at least 96% identical, at least 98% identical, at least 99% identical, or 100% identical) to:

(SEQ ID NO: 186)
ATTCCTCCCCACGTGCAGAAGAGCGTGAATAATGACATGATCGTGACCGA
TAACAATGGCGCCGTGAAATTTCCCCAGCTGTGCAAATTCTGCGATGTGA
GGTTTTCCACCTGCGACAACCAGAAGTCCTGTATGAGCAACTGCTCCATC
ACCTCCATCTGTGAGAAGCCTCAGGAGGTGTGCGTGGCTGTCTGGCGGAA
GAATGACGAGAATATCACCCTGGAAACCGTCTGCCACGATCCCAAGCTGC
CCTACCACGATTTCATCCTGGAAGACGCCGCCAGCCCTAAGTGCATCATG
AAAGAGAAAAAGAAGCCTGGCGAGACCTTTTTCATGTGCTCCTGCAGCAG
CGACGAATGCAACGACAATATCATCTTTAGCGAGGAATACAATACCAGCA
ACCCCGAC.

[0740] In some embodiments of these multi-chain chimeric polypeptides, the soluble TGF-β receptor includes a sequence that is at least 80% identical (e.g., at least 82% identical, at least 84% identical, at least 86% identical, at least 88% identical, at least 90% identical, at least 92% identical, at least 94% identical, at least 96% identical, at least 98% identical, at least 99% identical, or 100% identical) to:

(SEQ ID NO: 188)
IPPHVQKSVNNDMIVTDNNGAVKFPQLCKFCDVRFSTCDNQKSCMSNCSI
TSICEKPQEVCVAVWRKNDENITLETVCHDPKLPYHDFILEDAASPKCIM
KEKKKPGETFFMCSCSSDECNDNIIFSEEYNTSNPDGGGGSGGGGSGGGG
SIPPHVQKSVNNDMIVTDNNGAVKFPQLCKFCDVRFSTCDNQKSCMSNCS
ITSICEKPQEVCVAVWRKNDENITLETVCHDPKLPYHDFILEDAASPKCI
MKEKKKPGETFFMCSCSSDECNDNIIFSEEYNTSNPD.

[0741] In some embodiments of these multi-chain chimeric polypeptides, the soluble human TGFβRII receptor is encoded by a sequence that is at least 80% identical (e.g., at least 82% identical, at least 84% identical, at least 86% identical, at least 88% identical, at least 90% identical, at least 92% identical, at least 94% identical, at least 96% identical, at least 98% identical, at least 99% identical, or 100% identical) to:

(SEQ ID NO: 187)
ATCCCCCCCCATGTGCAAAAGAGCGTGAACAACGATATGATCGTGACCGA
CAACAACGGCGCCGTGAAGTTTCCCCAGCTCTGCAAGTTCTGCGATGTCA
GGTTCAGCACCTGCGATAATCAGAAGTCCTGCATGTCCAACTGCAGCATC
ACCTCCATCTGCGAGAAGCCCCAAGAAGTGTGCGTGGCCGTGTGGCGGAA
AAATGACGAGAACATCACCCTGGAGACCGTGTGTCACGACCCCAAGCTCC
CTTATCACGACTTCATTCTGGAGGACGCTGCCTCCCCCAAATGCATCATG
AAGGAGAAGAAGAAGCCCGGAGAGACCTTCTTTATGTGTTCCTGTAGCAG
CGACGAGTGTAACGACAACATCATCTTCAGCGAAGAGTACAACACCAGCA
ACCCTGATGGAGGTGGCGGATCCGGAGGTGGAGGTTCTGGTGGAGGTGGG
AGTATTCCTCCCCACGTGCAGAAGAGCGTGAATAATGACATGATCGTGAC
CGATAACAATGGCGCCGTGAAATTTCCCCAGCTGTGCAAATTCTGCGATG
TGAGGTTTTCCACCTGCGACAACCAGAAGTCCTGTATGAGCAACTGCTCC
ATCACCTCCATCTGTGAGAAGCCTCAGGAGGTGTGCGTGGCTGTCTGGCG
GAAGAATGACGAGAATATCACCCTGGAAACCGTCTGCCACGATCCCAAGC
TGCCCTACCACGATTTCATCCTGGAAGACGCCGCCAGCCCTAAGTGCATC
ATGAAAGAGAAAAAGAAGCCTGGCGAGACCTTTTTCATGTGCTCCTGCAG
CAGCGACGAATGCAACGACAATATCATCTTTAGCGAGGAATACAATACCA
GCAACCCCGAC.

[0742] In some embodiments of these multi-chain chimeric polypeptides, the sequence of soluble human IL-21 comprises a sequence that is at least 80% identical (e.g., at least 82% identical, at least 84% identical, at least 86% identical, at least 88% identical, at least 90% identical, at least 92% identical, at least 94% identical, at least 96% identical, at least 98% identical, at least 99% identical, or 100% identical) to:

(SEQ ID NO: 83)
[sequence omitted]

[0743] In some embodiments of these multi-chain chimeric polypeptides, the soluble human IL-21 is encoded by a sequence that is at least 80% identical (e.g., at least 82% identical, at least 84% identical, at least 86% identical, at least 88% identical, at least 90% identical, at least 92% identical, at least 94% identical, at least 96% identical, at least 98% identical, at least 99% identical, or 100% identical) to:

(SEQ ID NO: 197)
CAAGGTCAAGATCGCCACATGATTAGAATGCGTCAACTTATAGATATTGT
TGATCAGCTGAAAAATTATGTGAATGACTTGGTCCCTGAATTTCTGCCAG
CTCCAGAAGATGTAGAGACAAACTGTGAGTGGTCAGCTTTTTCCTGTTTT
CAGAAGGCCCAACTAAAGTCAGCAAATACAGGAAACAATGAAAGGATAAT
CAATGTATCAATTAAAAAGCTGAAGAGGAAACCACCTTCCACAAATGCAG
GGAGAAGACAGAAACACAGACTAACATGCCCTTCATGTGATTCTTATGAG
AAAAAACCACCCAAAGAATTCCTAGAAAGATTCAAATCACTTCTCCAAAA
GATGATTCATCAGCATCTGTCCTCTAGAACACACGGAAGTGAAGATTCC.

[0744] In some embodiments of these multi-chain chimeric polypeptides, the soluble human IL-21 is encoded by a sequence that is at least 80% identical (e.g., at least 82% identical, at least 84% identical, at least 86% identical, at least 88% identical, at least 90% identical, at least 92% identical, at least 94% identical, at least 96% identical, at least 98% identical, at least 99% identical, or 100% identical) to:

(SEQ ID NO: 182)
CAGGGCCAGGACAGGCACATGATCCGGATGAGGCAGCTCATCGACATCGT
CGACCAGCTGAAGAACTACGTGAACGACCTGGTGCCCGAGTTTCTGCCTG
CCCCCGAGGACGTGGAGACCAACTGCGAGTGGTCCGCCTTCTCCTGCTTT
CAGAAGGCCCAGCTGAAGTCCGCCAACACCGGCAACAACGAGCGGATCAT
CAACGTGAGCATCAAGAAGCTGAAGCGGAAGCCTCCCTCCACAAACGCCG
GCAGGAGGCAGAAGCACAGGCTGACCTGCCCCAGCTGTGACTCCTACGAG
AAGAAGCCCCCCAAGGAGTTCCTGGAGAGGTTCAAGTCCCTGCTGCAGAA
GATGATCCATCAGCACCTGTCCTCCAGGACCCACGGCTCCGAGGACTCC.

[0745] In some embodiments of these multi-chain chimeric polypeptides, the scFv that binds specifically to CD16 includes a light chain variable domain that includes a sequence that is at least 80% identical (e.g., at least 82% identical, at least 84% identical, at least 86% identical, at least 88% identical, at least 90% identical, at least 92% identical, at least 94% identical, at least 96% identical, at least 98% identical, at least 99% identical, or 100% identical) to:

(SEQ ID NO: 215)
SELTQDPAVSVALGQTVRITCQGDSLRSYYASWYQQKPGQAPVLVIYGKN
NRPSGIPDRFSGSSSGNTASLTITGAQAEDEADYYCNSRDSSGNHVVFGG
GTKLTVGH.

[0746] In some embodiments of these multi-chain chimeric polypeptides, the scFv that binds specifically to CD16 is encoded by a light chain variable domain sequence that is at least 80% identical (e.g., at least 82% identical, at least 84% identical, at least 86% identical, at least 88% identical, at least 90% identical, at least 92% identical, at least 94% identical, at least 96% identical, at least 98% identical, at least 99% identical, or 100% identical) to:

(SEQ ID NO: 216)
TCCGAGCTGACCCAGGACCCTGCTGTGTCCGTGGCTCTGGGCCAGACCGT
GAGGATCACCTGCCAGGGCGACTCCCTGAGGTCCTACTACGCCTCCTGGT
ACCAGCAGAAGCCCGGCCAGGCTCCTGTGCTGGTGATCTACGGCAAGAAC
AACAGGCCCTCCGGCATCCCTGACAGGTTCTCCGGATCCTCCTCCGGCAA
CACCGCCTCCCTGACCATCACAGGCGCTCAGGCCGAGGACGAGGCTGACT
ACTACTGCAACTCCAGGGACTCCTCCGGCAACCATGTGGTGTTCGGCGGC
GGCACCAAGCTGACCGTGGGCCAT.

[0747] In some embodiments of these multi-chain chimeric polypeptides, the scFv that binds specifically to CD16 includes a heavy chain variable domain that includes a sequence that is at least 80% identical (e.g., at least 82% identical, at least 84% identical, at least 86% identical, at least 88% identical, at least 90% identical, at least 92% identical, at least 94% identical, at least 96% identical, at least 98% identical, at least 99% identical, or 100% identical) to:

(SEQ ID NO: 217)
EVQLVESGGGVVRPGGSLRLSCAASGFTFDDYGMSWVRQAPGKGLEWVSG
INWNGGSTGYADSVKGRFTISRDNAKNSLYLQMNSLRAEDTAVYYCARGR
SLLFDYWGQGTLVTVSR.

[0748] In some embodiments of these multi-chain chimeric polypeptides, the scFv that binds specifically to CD16 is encoded by a heavy chain variable domain sequence that is at least 80% identical (e.g., at least 82% identical, at least 84% identical, at least 86% identical, at least 88% identical, at least 90% identical, at least 92% identical, at least 94% identical, at least 96% identical, at least 98% identical, at least 99% identical, or 100% identical) to:

(SEQ ID NO: 218)
GAGGTGCAGCTGGTGGAGTCCGGAGGAGGAGTGGTGAGGCCTGGAGGCTC
CCTGAGGCTGAGCTGTGCTGCCTCCGGCTTCACCTTCGACGACTACGGCA
TGTCCTGGGTGAGGCAGGCTCCTGGAAAGGGCCTGGAGTGGGTGTCCGGC
ATCAACTGGAACGGCGGATCCACCGGCTACGCCGATTCCGTGAAGGGCAG
GTTCACCATCAGCAGGGACAACGCCAAGAACTCCCTGTACCTGCAGATGA
ACTCCCTGAGGGCCGAGGACACCGCCGTGTACTACTGCGCCAGGGGCAGG
TCCCTGCTGTTCGACTACTGGGGACAGGGCACCCTGGTGACCGTGTCCAG
G.

[0749] In some embodiments, the first chimeric polypeptide can include a sequence that is at least 80% identical (e.g., at least 82% identical, at least 84% identical, at least 86% identical, at least 88% identical, at least 90% identical, at least 92% identical, at least 94% identical, at least 96% identical, at least 98% identical, at least 99% identical, or 100% identical) to:

(SEQ ID NO: 236)
IPPHVQKSVNNDMIVTDNNGAVKFPQLCKFCDVRFSTCDNQKSCMSNCSI
TSICEKPQEVCVAVWRKNDENITLETVCHDPKLPYHDFILEDAASPKCIM
KEKKKPGETFFMCSCSSDECNDNIIFSEEYNTSNPDGGGGSGGGGSGGGG
SIPPHVQKSVNNDMIVTDNNGAVKFPQLCKFCDVRFSTCDNQKSCMSNCS
ITSICEKPQEVCVAVWRKNDENITLETVCHDPKLPYHDFILEDAASPKCI
MKEKKKPGETFFMCSCSSDECNDNIIFSEEYNTSNPDSGTTNTVAAYNLT
WKSTNFKTILEWEPKPVNQVYTVQISTKSGDWKSKCFYTTDTECDLTDEI
VKDVKQTYLARVFSYPAGNVESTGSAGEPLYENSPEFTPYLETNLGQPTI
QSFEQVGTKVNVTVEDERTLVRRNNTFLSLRDVFGKDLIYTLYYWKSSSS
GKKTAKTNTNEFLIDVDKGENYCFSVQAVIPSRTVNRKSTDSPVECMGQE
KGEFRENWVNVISDLKKIEDLIQSMHIDATLYTESDVHPSCKVTAMKCFL
LELQVISLESGDASIHDTVENLIILANNSLSSNGNVTESGCKECEELEEK
NIKEFLQSFVHIVQMFINTS.

[0750] In some embodiments, a first chimeric polypeptide is encoded by a sequence that is at least 80% identical (e.g., at least 82% identical, at least 84% identical, at least 86% identical, at least 88% identical, at least 90% identical, at least 92% identical, at least 94% identical, at least 96% identical, at least 98% identical, at least 99% identical, or 100% identical) to:

(SEQ ID NO: 237)
ATCCCCCCCCATGTGCAAAAGAGCGTGAACAACGATATGATCGTGACCGA
CAACAACGGCGCCGTGAAGTTTCCCCAGCTCTGCAAGTTCTGCGATGTCA
GGTTCAGCACCTGCGATAATCAGAAGTCCTGCATGTCCAACTGCAGCATC
ACCTCCATCTGCGAGAAGCCCCAAGAAGTGTGCGTGGCCGTGTGGCGGAA
AAATGACGAGAACATCACCCTGGAGACCGTGTGTCACGACCCCAAGCTCC
CTTATCACGACTTCATTCTGGAGGACGCTGCCTCCCCCAAATGCATCATG
AAGGAGAAGAAGAAGCCCGGAGAGACCTTCTTTATGTGTTCCTGTAGCAG
CGACGAGTGTAACGACAACATCATCTTCAGCGAAGAGTACAACACCAGCA
ACCCTGATGGAGGTGGCGGATCCGGAGGTGGAGGTTCTGGTGGAGGTGGG
AGTATTCCTCCCCACGTGCAGAAGAGCGTGAATAATGACATGATCGTGAC
CGATAACAATGGCGCCGTGAAATTTCCCCAGCTGTGCAAATTCTGCGATG
TGAGGTTTTCCACCTGCGACAACCAGAAGTCCTGTATGAGCAACTGCTCC
ATCACCTCCATCTGTGAGAAGCCTCAGGAGGTGTGCGTGGCTGTCTGGCG
GAAGAATGACGAGAATATCACCCTGGAAACCGTCTGCCACGATCCCAAGC
TGCCCTACCACGATTTCATCCTGGAAGACGCCGCCAGCCCTAAGTGCATC
ATGAAAGAGAAAAAGAAGCCTGGCGAGACCTTTTTCATGTGCTCCTGCAG
CAGCGACGAATGCAACGACAATATCATCTTTAGCGAGGAATACAATACCA
GCAACCCCGACAGCGGCACAACCAACACAGTCGCTGCCTATAACCTCACT
TGGAAGAGCACCAACTTCAAAACCATCCTCGAATGGGAACCCAAACCCGT
TAACCAAGTTTACACCGTGCAGATCAGCACCAAGTCCGGCGACTGGAAGT
CCAAATGTTTCTATACCACCGACACCGAGTGCGATCTCACCGATGAGATC
GTGAAAGATGTGAAACAGACCTACCTCGCCCGGGTGTTTAGCTACCCCGC
CGGCAATGTGGAGAGCACTGGTTCCGCTGGCGAGCCTTTATACGAGAACA
GCCCCGAATTTACCCCTTACCTCGAGACCAATTTAGGACAGCCCACCATC
CAAAGCTTTGAGCAAGTTGGCACAAAGGTGAATGTGACAGTGGAGGACGA
GCGGACTTTAGTGCGGCGGAACAACACCTTTCTCAGCCTCCGGGATGTGT
TCGGCAAAGATTTAATCTACACACTGTATTACTGGAAGTCCTCTTCCTCC
GGCAAGAAGACAGCTAAAACCAACACAAACGAGTTTTTAATCGACGTGGA
TAAAGGCGAAAACTACTGTTTCAGCGTGCAAGCTGTGATCCCCTCCCGGA
CCGTGAATAGGAAAAGCACCGATAGCCCCGTTGAGTGCATGGGCCAAGAA
AAGGGCGAGTTCCGGGAGAACTGGGTGAACGTCATCAGCGATTTAAAGAA
GATCGAAGATTTAATTCAGTCCATGCATATCGACGCCACTTTATACACAG
AATCCGACGTGCACCCCTCTTGTAAGGTGACCGCCATGAAATGTTTTTTA
CTGGAGCTGCAAGTTATCTCTTTAGAGAGCGGAGACGCTAGCATCCACGA
CACCGTGGAGAATTTAATCATTTTAGCCAATAACTCTTTATCCAGCAACG
GCAACGTGACAGAGTCCGGCTGCAAGGAGTGCGAAGAGCTGGAGGAGAAG
AACATCAAGGAGTTTCTGCAATCCTTTGTGCACATTGTCCAGATGTTCAT
CAATACCTCC.

[0751] In some embodiments, a first chimeric polypeptide can include a sequence that is at least 80% identical (e.g., at least 82% identical, at least 84% identical, at least 86% identical, at least 88% identical, at least 90% identical, at least 92% identical, at least 94% identical, at least 96% identical, at least 98% identical, at least 99% identical, or 100% identical) to:

(SEQ ID NO: 238)
MKWVTFISLLFLFSSAYSIPPHVQKSVNNDMIVTDNNGAVKFPQLCKFCD
VRFSTCDNQKSCMSNCSITSICEKPQEVCVAVWRKNDENITLETVCHDPK
LPYHDFILEDAASPKCIMKEKKKPGETFFMCSCSSDECNDNIIFSEEYNT
SNPDGGGGSGGGGSGGGGSIPPHVQKSVNNDMIVTDNNGAVKFPQLCKFC
DVRFSTCDNQKSCMSNCSITSICEKPQEVCVAVWRKNDENITLETVCHDP
KLPYHDFILEDAASPKCIMKEKKKPGETFFMCSCSSDECNDNIIFSEEYN
TSNPDSGTTNTVAAYNLTWKSTNFKTILEWEPKPVNQVYTVQISTKSGDW
KSKCFYTTDTECDLTDEIVKDVKQTYLARVFSYPAGNVESTGSAGEPLYE
NSPEFTPYLETNLGQPTIQSFEQVGTKVNVTVEDERTLVRRNNTFLSLRD
VFGKDLIYTLYYWKSSSSGKKTAKTNTNEFLIDVDKGENYCFSVQAVIPS
RTVNRKSTDSPVECMGQEKGEFRENWVNVISDLKKIEDLIQSMHIDATLY
TESDVHPSCKVTAMKCFLLELQVISLESGDASIHDTVENLIILANNSLSS
NGNVTESGCKECEELEEKNIKEFLQSFVHIVQMFINTS.

[0752] In some embodiments, a first chimeric polypeptide is encoded by a sequence that is at least 80% identical (e.g., at least 82% identical, at least 84% identical, at least 86% identical, at least 88% identical, at least 90% identical, at least 92% identical, at least 94% identical, at least 96% identical, at least 98% identical, at least 99% identical, or 100% identical) to:

(SEQ ID NO: 239)
ATGAAGTGGGTGACCTTCATCAGCCTGCTGTTCCTGTTCTCCAGCGCCTA
CTCCATCCCCCCCCATGTGCAAAAGAGCGTGAACAACGATATGATCGTGA
CCGACAACAACGGCGCCGTGAAGTTTCCCCAGCTCTGCAAGTTCTGCGAT
GTCAGGTTCAGCACCTGCGATAATCAGAAGTCCTGCATGTCCAACTGCAG
CATCACCTCCATCTGCGAGAAGCCCCAAGAAGTGTGCGTGGCCGTGTGGC
GGAAAAATGACGAGAACATCACCCTGGAGACCGTGTGTCACGACCCCAAG
CTCCCTTATCACGACTTCATTCTGGAGGACGCTGCCTCCCCCAAATGCAT
CATGAAGGAGAAGAAGAAGCCCGGAGAGACCTTCTTTATGTGTTCCTGTA
GCAGCGACGAGTGTAACGACAACATCATCTTCAGCGAAGAGTACAACACC
AGCAACCCTGATGGAGGTGGCGGATCCGGAGGTGGAGGTTCTGGTGGAGG
TGGGAGTATTCCTCCCCACGTGCAGAAGAGCGTGAATAATGACATGATCG
TGACCGATAACAATGGCGCCGTGAAATTTCCCCAGCTGTGCAAATTCTGC
GATGTGAGGTTTTCCACCTGCGACAACCAGAAGTCCTGTATGAGCAACTG
CTCCATCACCTCCATCTGTGAGAAGCCTCAGGAGGTGTGCGTGGCTGTCT
GGCGGAAGAATGACGAGAATATCACCCTGGAAACCGTCTGCCACGATCCC
AAGCTGCCCTACCACGATTTCATCCTGGAAGACGCCGCCAGCCCTAAGTG
CATCATGAAAGAGAAAAAGAAGCCTGGCGAGACCTTTTTCATGTGCTCCT
GCAGCAGCGACGAATGCAACGACAATATCATCTTTAGCGAGGAATACAAT
ACCAGCAACCCCGACAGCGGCACAACCAACACAGTCGCTGCCTATAACCT
CACTTGGAAGAGCACCAACTTCAAAACCATCCTCGAATGGGAACCCAAAC
CCGTTAACCAAGTTTACACCGTGCAGATCAGCACCAAGTCCGGCGACTGG
AAGTCCAAATGTTTCTATACCACCGACACCGAGTGCGATCTCACCGATGA
GATCGTGAAAGATGTGAAACAGACCTACCTCGCCCGGGTGTTTAGCTACC
CCGCCGGCAATGTGGAGAGCACTGGTTCCGCTGGCGAGCCTTTATACGAG
AACAGCCCCGAATTTACCCCTTACCTCGAGACCAATTTAGGACAGCCCAC
CATCCAAAGCTTTGAGCAAGTTGGCACAAAGGTGAATGTGACAGTGGAGG
ACGAGCGGACTTTAGTGCGGCGGAACAACACCTTTCTCAGCCTCCGGGAT
GTGTTCGGCAAAGATTTAATCTACACACTGTATTACTGGAAGTCCTCTTC
CTCCGGCAAGAAGACAGCTAAAACCAACACAAACGAGTTTTTAATCGACG
TGGATAAAGGCGAAAACTACTGTTTCAGCGTGCAAGCTGTGATCCCCTCC
CGGACCGTGAATAGGAAAAGCACCGATAGCCCCGTTGAGTGCATGGGCCA
AGAAAAGGGCGAGTTCCGGGAGAACTGGGTGAACGTCATCAGCGATTTAA
AGAAGATCGAAGATTTAATTCAGTCCATGCATATCGACGCCACTTTATAC
ACAGAATCCGACGTGCACCCCTCTTGTAAGGTGACCGCCATGAAATGTTT
TTTACTGGAGCTGCAAGTTATCTCTTTAGAGAGCGGAGACGCTAGCATCC
ACGACACCGTGGAGAATTTAATCATTTTAGCCAATAACTCTTTATCCAGC
AACGGCAACGTGACAGAGTCCGGCTGCAAGGAGTGCGAAGAGCTGGAGGA
GAAGAACATCAAGGAGTTTCTGCAATCCTTTGTGCACATTGTCCAGATGT
TCATCAATACCTCC.

[0753] In some embodiments, the second chimeric polypeptide can include a sequence that is at least 80% identical (e.g., at least 82% identical, at least 84% identical, at least 86% identical, at least 88% identical, at least 90% identical, at least 92% identical, at least 94% identical, at least 96% identical, at least 98% identical, at least 99% identical, or 100% identical) to:

(SEQ ID NO: 232)
SELTQDPAVSVALGQTVRITCQGDSLRSYYASWYQQKPGQAPVLVIYGKN
NRPSGIPDRFSGSSSGNTASLTITGAQAEDEADYYCNSRDSSGNHVVFGG
GTKLTVGHGGGGSGGGGSGGGGSEVQLVESGGGVVRPGGSLRLSCAASGF
TFDDYGMSWVRQAPGKGLEWVSGINWNGGSTGYADSVKGRFTISRDNAKN
SLYLQMNSLRAEDTAVYYCARGRSLLFDYWGQGTLVTVSRITCPPPMSVE
HADIWVKSYSLYSRERYICNSGFKRKAGTSSLTECVLNKATNVAHWTTPS
LKCIRQGQDRHMIRMRQLIDIVDQLKNYVNDLVPEFLPAPEDVETNCEWS
AFSCFQKAQLKSANTGNNERIINVSIKKLKRKPPSTNAGRRQKHRLTCPS
CDSYEKKPPKEFLERFKSLLQKMIHQHLSSRTHGSEDS.

[0754] In some embodiments, a second chimeric polypeptide is encoded by a sequence that is at least 80% identical (e.g., at least 82% identical, at least 84% identical, at least 86% identical, at least 88% identical, at least 90% identical, at least 92% identical, at least 94% identical, at least 96% identical, at least 98% identical, at least 99% identical, or 100% identical) to:

(SEQ ID NO: 233)
TCCGAGCTGACCCAGGACCCTGCTGTGTCCGTGGCTCTGGGCCAGACCGT
GAGGATCACCTGCCAGGGCGACTCCCTGAGGTCCTACTACGCCTCCTGGT
ACCAGCAGAAGCCCGGCCAGGCTCCTGTGCTGGTGATCTACGGCAAGAAC
AACAGGCCCTCCGGCATCCCTGACAGGTTCTCCGGATCCTCCTCCGGCAA
CACCGCCTCCCTGACCATCACAGGCGCTCAGGCCGAGGACGAGGCTGACT
ACTACTGCAACTCCAGGGACTCCTCCGGCAACCATGTGGTGTTCGGCGGC
GGCACCAAGCTGACCGTGGGCCATGGCGGCGGCGGCTCCGGAGGCGGCGG
CAGCGGCGGAGGAGGATCCGAGGTGCAGCTGGTGGAGTCCGGAGGAGGAG
TGGTGAGGCCTGGAGGCTCCCTGAGGCTGAGCTGTGCTGCCTCCGGCTTC
ACCTTCGACGACTACGGCATGTCCTGGGTGAGGCAGGCTCCTGGAAAGGG
CCTGGAGTGGGTGTCCGGCATCAACTGGAACGGCGGATCCACCGGCTACG
CCGATTCCGTGAAGGGCAGGTTCACCATCAGCAGGGACAACGCCAAGAAC
TCCCTGTACCTGCAGATGAACTCCCTGAGGGCCGAGGACACCGCCGTGTA
CTACTGCGCCAGGGGCAGGTCCCTGCTGTTCGACTACTGGGGACAGGGCA
CCCTGGTGACCGTGTCCAGGATTACATGCCCCCCTCCCATGAGCGTGGAG
CACGCCGACATCTGGGTGAAGAGCTATAGCCTCTACAGCCGGGAGAGGTA
TATCTGTAACAGCGGCTTCAAGAGGAAGGCCGGCACCAGCAGCCTCACCG
AGTGCGTGCTGAATAAGGCTACCAACGTGGCTCACTGGACAACACCCTCT
TTAAAGTGCATCCGGCAGGGCCAGGACAGGCACATGATCCGGATGAGGCA
GCTCATCGACATCGTCGACCAGCTGAAGAACTACGTGAACGACCTGGTGC
CCGAGTTTCTGCCTGCCCCCGAGGACGTGGAGACCAACTGCGAGTGGTCC
GCCTTCTCCTGCTTTCAGAAGGCCCAGCTGAAGTCCGCCAACACCGGCAA
CAACGAGCGGATCATCAACGTGAGCATCAAGAAGCTGAAGCGGAAGCCTC
CCTCCACAAACGCCGGCAGGAGGCAGAAGCACAGGCTGACCTGCCCCAGC
TGTGACTCCTACGAGAAGAAGCCCCCCAAGGAGTTCCTGGAGAGGTTCAA
GTCCCTGCTGCAGAAGATGATCCATCAGCACCTGTCCTCCAGGACCCACG
GCTCCGAGGACTCC.

[0755] In some embodiments, a second chimeric polypeptide can include a sequence that is at least 80% identical (e.g., at least 82% identical, at least 84% identical, at least 86% identical, at least 88% identical, at least 90% identical, at least 92% identical, at least 94% identical, at least 96% identical, at least 98% identical, at least 99% identical, or 100% identical) to:

(SEQ ID NO: 234)
MKWVTFISLLFLFSSAYSSELTQDPAVSVALGQTVRITCQGDSLRSYYAS
WYQQKPGQAPVLVIYGKNNRPSGIPDRFSGSSSGNTASLTITGAQAEDEA
DYYCNSRDSSGNHVVFGGGTKLTVGHGGGGSGGGGSGGGGSEVQLVESGG
GVVRPGGSLRLSCAASGFTFDDYGMSWVRQAPGKGLEWVSGINWNGGSTG
YADSVKGRFTISRDNAKNSLYLQMNSLRAEDTAVYYCARGRSLLFDYWGQ
GTLVTVSRITCPPPMSVEHADIWVKSYSLYSRERYICNSGFKRKAGTSSL
TECVLNKATNVAHWTTPSLKCIRQGQDRHMIRMRQLIDIVDQLKNYVNDL
VPEFLPAPEDVETNCEWSAFSCFQKAQLKSANTGNNERIINVSIKKLKRK
PPSTNAGRRQKHRLTCPSCDSYEKKPPKEFLERFKSLLQKMIHQHLSSRT
HGSEDS.

[0756] In some embodiments, a second chimeric polypeptide is encoded by a sequence that is at least 80% identical (e.g., at least 82% identical, at least 84% identical, at least 86% identical, at least 88% identical, at least 90% identical, at least 92% identical, at least 94% identical, at least 96% identical, at least 98% identical, at least 99% identical, or 100% identical) to:

(SEQ ID NO: 235)
ATGAAGTGGGTGACCTTCATCAGCCTGCTGTTCCTGTTCTCCAGCGCCTA
CTCCTCCGAGCTGACCCAGGACCCTGCTGTGTCCGTGGCTCTGGGCCAGA
CCGTGAGGATCACCTGCCAGGGCGACTCCCTGAGGTCCTACTACGCCTCC
TGGTACCAGCAGAAGCCCGGCCAGGCTCCTGTGCTGGTGATCTACGGCAA
GAACAACAGGCCCTCCGGCATCCCTGACAGGTTCTCCGGATCCTCCTCCG
GCAACACCGCCTCCCTGACCATCACAGGCGCTCAGGCCGAGGACGAGGCT
GACTACTACTGCAACTCCAGGGACTCCTCCGGCAACCATGTGGTGTTCGG
CGGCGGCACCAAGCTGACCGTGGGCCATGGCGGCGGCGGCTCCGGAGGCG
GCGGCAGCGGCGGAGGAGGATCCGAGGTGCAGCTGGTGGAGTCCGGAGGA
GGAGTGGTGAGGCCTGGAGGCTCCCTGAGGCTGAGCTGTGCTGCCTCCGG
CTTCACCTTCGACGACTACGGCATGTCCTGGGTGAGGCAGGCTCCTGGAA
AGGGCCTGGAGTGGGTGTCCGGCATCAACTGGAACGGCGGATCCACCGGC
TACGCCGATTCCGTGAAGGGCAGGTTCACCATCAGCAGGGACAACGCCAA
GAACTCCCTGTACCTGCAGATGAACTCCCTGAGGGCCGAGGACACCGCCG
TGTACTACTGCGCCAGGGGCAGGTCCCTGCTGTTCGACTACTGGGGACAG
GGCACCCTGGTGACCGTGTCCAGGATTACATGCCCCCCTCCCATGAGCGT
GGAGCACGCCGACATCTGGGTGAAGAGCTATAGCCTCTACAGCCGGGAGA
GGTATATCTGTAACAGCGGCTTCAAGAGGAAGGCCGGCACCAGCAGCCTC
ACCGAGTGCGTGCTGAATAAGGCTACCAACGTGGCTCACTGGACAACACC
CTCTTTAAAGTGCATCCGGCAGGGCCAGGACAGGCACATGATCCGGATGA
GGCAGCTCATCGACATCGTCGACCAGCTGAAGAACTACGTGAACGACCTG
GTGCCCGAGTTTCTGCCTGCCCCCGAGGACGTGGAGACCAACTGCGAGTG
GTCCGCCTTCTCCTGCTTTCAGAAGGCCCAGCTGAAGTCCGCCAACACCG
GCAACAACGAGCGGATCATCAACGTGAGCATCAAGAAGCTGAAGCGGAAG
CCTCCCTCCACAAACGCCGGCAGGAGGCAGAAGCACAGGCTGACCTGCCC
CAGCTGTGACTCCTACGAGAAGAAGCCCCCCAAGGAGTTCCTGGAGAGGT
TCAAGTCCCTGCTGCAGAAGATGATCCATCAGCACCTGTCCTCCAGGACC
CACGGCTCCGAGGACTCC.

### Exemplary Multi-Chain Chimeric Polypeptides—Type H

[0757] In some embodiments of any of the multi-chain chimeric polypeptides described herein, the first target-binding domain and the second targeting-binding domain each independently bind specifically to a receptor of IL-7. In some examples of these multi-chain chimeric polypeptides, the first target-binding domain and the soluble tissue factor domain directly abut each other in the first chimeric polypeptide. In some examples of these multi-chain chimeric polypeptides, the first chimeric polypeptide further comprises a linker sequence (e.g., any of the exemplary linkers described herein) between the first target-binding domain and the soluble tissue factor domain in the first chimeric polypeptide.

[0758] In some embodiments of these multi-chain chimeric polypeptides, the soluble tissue factor domain and the first domain of the pair of affinity domains directly abut each other in the first chimeric polypeptide. In some embodiments of these multi-chain chimeric polypeptides, the first chimeric polypeptide further includes a linker sequence (e.g., any of the exemplary linkers described herein) between the soluble tissue factor domain and the first domain of the pair of affinity domains in the first chimeric polypeptide.

[0759] In some embodiments of these multi-chain chimeric polypeptides, the second domain of the pair of affinity domains and the second target-binding domain directly abut each other in the second chimeric polypeptide. In some embodiments of these multi-chain chimeric polypeptides, the second chimeric polypeptide further includes a linker sequence (e.g., any of the exemplary linkers described herein) between the second domain of the pair of affinity domains and the second target-binding domain in the second chimeric polypeptide.

[0760] In some embodiments of these multi-chain chimeric polypeptides, the soluble tissue factor domain can be any of the exemplary soluble tissue factor domains described herein. In some embodiments of these multi-chain chimeric polypeptides, the pair of affinity domains can be any of the exemplary pairs of affinity domains described herein.

[0761] In some embodiments of these multi-chain chimeric polypeptides, the first target-binding domain and the second target-binding domain each independently bind specifically to a receptor for IL-7. In some embodiments of these multi-chain chimeric polypeptides, the first target-binding domain and the second target-binding domain bind specifically to the same epitope. In some embodiments of these multi-chain chimeric polypeptides, the first target-binding domain and the second target-binding domain include the same amino acid sequence.

[0762] In some embodiments of these multi-chain chimeric polypeptides, the first target-binding domain and the second target-binding domain include a soluble IL-7 (e.g., a soluble human IL-7). In some embodiments of these multi-chain chimeric polypeptides, the soluble human IL-7 includes a sequence that is at least 80% identical (e.g., at least 82% identical, at least 84% identical, at least 86% identical, at least 88% identical, at least 90% identical, at least 92% identical, at least 94% identical, at least 96% identical, at least 98% identical, at least 99% identical, or 100% identical) to:

(SEQ ID NO: 79)
DCDIEGKDGKQYESVLMVSIDQLLDSMKEIGSNCLNNEFNFFKRHICDAN
KEGMFLFRAARKLRQFLKMNSTGDFDLHLLKVSEGTTILLNCTGQVKGRK
PAALGEAQPTKSLEENKSLKEQKKLNDLCFLKRLLQEIKTCWNKILMGTK
EH.

[0763] In some embodiments of these multi-chain chimeric polypeptides, the soluble human IL-7 is encoded by a sequence that is at least 80% identical (e.g., at least 82% identical, at least 84% identical, at least 86% identical, at least 88% identical, at least 90% identical, at least 92% identical, at least 94% identical, at least 96% identical, at least 98% identical, at least 99% identical, or 100% identical) to:

(SEQ ID NO: 227)
GATTGCGACATCGAGGGCAAGGACGGCAAGCAGTACGAGAGCGTGCTGAT
GGTGTCCATCGACCAGCTGCTGGACAGCATGAAGGAGATCGGCTCCAACT
GCCTCAACAACGAGTTCAACTTCTTCAAGCGGCACATCTGCGACGCCAAC
AAGGAGGGCATGTTCCTGTTCAGGGCCGCCAGGAAACTGCGGCAGTTCCT
GAAGATGAACTCCACCGGCGACTTCGACCTGCACCTGCTGAAGGTGTCCG
AGGGCACCACCATCCTGCTGAACTGCACCGGACAGGTGAAGGGCCGGAAA
CCTGCTGCTCTGGGAGAGGCCCAACCCACCAAGAGCCTGGAGGAGAACAA
GTCCCTGAAGGAGCAGAAGAAGCTGAACGACCTGTGCTTCCTGAAGAGGC
TGCTGCAGGAGATCAAGACCTGCTGGAACAAGATCCTGATGGGCACCAAG
GAGCAT.

[0764] In some embodiments, the first chimeric polypeptide can include a sequence that is at least 80% identical (e.g., at least 82% identical, at least 84% identical, at least 86% identical, at least 88% identical, at least 90% identical, at least 92% identical, at least 94% identical, at least 96% identical, at least 98% identical, at least 99% identical, or 100% identical) to:

(SEQ ID NO: 207)
DCDIEGKDGKQYESVLMVSIDQLLDSMKEIGSNCLNNEFNEFKRHICDAN
KEGMFLFRAARKLRQFLKMNSTGDFDLHLLKVSEGTTILLNCTGQVKGRK
PAALGEAQPTKSLEENKSLKEQKKLNDLCFLKRLLQEIKTCWNKILMGTK
EHSGTTNTVAAYNLTWKSTNFKTILEWEPKPVNQVYTVQISTKSGDWKSK
CFYTTDTECDLTDEIVKDVKQTYLARVFSYPAGNVESTGSAGEPLYENSP
EFTPYLETNLGQPTIQSFEQVGTKVNVTVEDERTLVRRNNTFLSLRDVFG
KDLIYTLYYWKSSSSGKKTAKTNTNEFLIDVDKGENYCFSVQAVIPSRTV
NRKSTDSPVECMGQEKGEFRENWVNVISDLKKIEDLIQSMHIDATLYTES
DVHPSCKVTAMKCFLLELQVISLESGDASIHDTVENLIILANNSLSSNGN
VTESGCKECEELEEKNIKEFLQSFVHIVQMFINTS.

[0765] In some embodiments, a first chimeric polypeptide is encoded by a sequence that is at least 80% identical (e.g., at least 82% identical, at least 84% identical, at least 86% identical, at least 88% identical, at least 90% identical, at least 92% identical, at least 94% identical, at least 96% identical, at least 98% identical, at least 99% identical, or 100% identical) to:

(SEQ ID NO: 208)
GATTGCGACATCGAGGGCAAGGACGGCAAGCAGTACGAGAGCGTGCTGAT
GGTGTCCATCGACCAGCTGCTGGACAGCATGAAGGAGATCGGCTCCAACT
GCCTCAACAACGAGTTCAACTTCTTCAAGCGGCACATCTGCGACGCCAAC
AAGGAGGGCATGTTCCTGTTCAGGGCCGCCAGGAAACTGCGGCAGTTCCT
GAAGATGAACTCCACCGGCGACTTCGACCTGCACCTGCTGAAGGTGTCCG
AGGGCACCACCATCCTGCTGAACTGCACCGGACAGGTGAAGGGCCGGAAA
CCTGCTGCTCTGGGAGAGGCCCAACCCACCAAGAGCCTGGAGGAGAACAA
GTCCCTGAAGGAGCAGAAGAAGCTGAACGACCTGTGCTTCCTGAAGAGGC
TGCTGCAGGAGATCAAGACCTGCTGGAACAAGATCCTGATGGGCACCAAG
GAGCATAGCGGCACAACCAACACAGTCGCTGCCTATAACCTCACTTGGAA
GAGCACCAACTTCAAAACCATCCTCGAATGGGAACCCAAACCCGTTAACC
AAGTTTACACCGTGCAGATCAGCACCAAGTCCGGCGACTGGAAGTCCAAA
TGTTTCTATACCACCGACACCGAGTGCGATCTCACCGATGAGATCGTGAA
AGATGTGAAACAGACCTACCTCGCCCGGGTGTTTAGCTACCCCGCCGGCA
ATGTGGAGAGCACTGGTTCCGCTGGCGAGCCTTTATACGAGAACAGCCCC
GAATTTACCCCTTACCTCGAGACCAATTTAGGACAGCCCACCATCCAAAG
CTTTGAGCAAGTTGGCACAAAGGTGAATGTGACAGTGGAGGACGAGCGGA
CTTTAGTGCGGCGGAACAACACCTTTCTCAGCCTCCGGGATGTGTTCGGC
AAAGATTTAATCTACACACTGTATTACTGGAAGTCCTCTTCCTCCGGCAA
GAAGACAGCTAAAACCAACACAAACGAGTTTTTAATCGACGTGGATAAAG
GCGAAAACTACTGTTTCAGCGTGCAAGCTGTGATCCCCTCCCGGACCGTG
AATAGGAAAAGCACCGATAGCCCCGTTGAGTGCATGGGCCAAGAAAAGGG
CGAGTTCCGGGAGAACTGGGTGAACGTCATCAGCGATTTAAAGAAGATCG
AAGATTTAATTCAGTCCATGCATATCGACGCCACTTTATACACAGAATCC
GACGTGCACCCCTCTTGTAAGGTGACCGCCATGAAATGTTTTTTACTGGA
GCTGCAAGTTATCTCTTTAGAGAGCGGAGACGCTAGCATCCACGACACCG
TGGAGAATTTAATCATTTTAGCCAATAACTCTTTATCCAGCAACGGCAAC
GTGACAGAGTCCGGCTGCAAGGAGTGCGAAGAGCTGGAGGAGAAGAACAT
CAAGGAGTTTCTGCAATCCTTTGTGCACATTGTCCAGATGTTCATCAATA
CCTCC.

[0766] In some embodiments, a first chimeric polypeptide can include a sequence that is at least 80% identical (e.g., at least 82% identical, at least 84% identical, at least 86% identical, at least 88% identical, at least 90% identical, at least 92% identical, at least 94% identical, at least 96% identical, at least 98% identical, at least 99% identical, or 100% identical) to:

(SEQ ID NO: 209)
MKWVTFISLLFLFSSAYSDCDIEGKDGKQYESVLMVSIDQLLDSMKEIGS
NCLNNEFNFFKRHICDANKEGMFLFRAARKLRQFLKMNSTGDFDLHLLKV
SEGTTILLNCTGQVKGRKPAALGEAQPTKSLEENKSLKEQKKLNDLCFLK
RLLQEIKTCWNKILMGTKEHSGTTNTVAAYNLTWKSTNFKTILEWEPKPV
NQVYTVQISTKSGDWKSKCFYTTDTECDLTDEIVKDVKQTYLARVFSYPA
GNVESTGSAGEPLYENSPEFTPYLETNLGQPTIQSFEQVGTKVNVTVEDE
RTLVRRNNTFLSLRDVFGKDLIYTLYYWKSSSSGKKTAKTNTNEFLIDVD
KGENYCFSVQAVIPSRTVNRKSTDSPVECMGQEKGEFRENWVNVISDLKK
IEDLIQSMHIDATLYTESDVHPSCKVTAMKCFLLELQVISLESGDASIHD
TVENLIILANNSLSSNGNVTESGCKECEELEEKNIKEFLQSFVHIVQMFI
NTS.

[0767] In some embodiments, a first chimeric polypeptide is encoded by a sequence that is at least 80% identical (e.g., at least 82% identical, at least 84% identical, at least 86% identical, at least 88% identical, at least 90% identical, at least 92% identical, at least 94% identical, at least 96% identical, at least 98% identical, at least 99% identical, or 100% identical) to:

(SEQ ID NO: 210)
ATGAAGTGGGTGACCTTCATCAGCCTGCTGTTCCTGTTCTCCAGCGCCTA
CTCCGATTGCGACATCGAGGGCAAGGACGGCAAGCAGTACGAGAGCGTGC
TGATGGTGTCCATCGACCAGCTGCTGGACAGCATGAAGGAGATCGGCTCC
AACTGCCTCAACAACGAGTTCAACTTCTTCAAGCGGCACATCTGCGACGC
CAACAAGGAGGGCATGTTCCTGTTCAGGGCCGCCAGGAAACTGCGGCAGT
TCCTGAAGATGAACTCCACCGGCGACTTCGACCTGCACCTGCTGAAGGTG
TCCGAGGGCACCACCATCCTGCTGAACTGCACCGGACAGGTGAAGGGCCG
GAAACCTGCTGCTCTGGGAGAGGCCCAACCCACCAAGAGCCTGGAGGAGA
ACAAGTCCCTGAAGGAGCAGAAGAAGCTGAACGACCTGTGCTTCCTGAAG
AGGCTGCTGCAGGAGATCAAGACCTGCTGGAACAAGATCCTGATGGGCAC
CAAGGAGCATAGCGGCACAACCAACACAGTCGCTGCCTATAACCTCACTT
GGAAGAGCACCAACTTCAAAACCATCCTCGAATGGGAACCCAAACCCGTT
AACCAAGTTTACACCGTGCAGATCAGCACCAAGTCCGGCGACTGGAAGTC
CAAATGTTTCTATACCACCGACACCGAGTGCGATCTCACCGATGAGATCG
TGAAAGATGTGAAACAGACCTACCTCGCCCGGGTGTTTAGCTACCCCGCC
GGCAATGTGGAGAGCACTGGTTCCGCTGGCGAGCCTTTATACGAGAACAG
CCCCGAATTTACCCCTTACCTCGAGACCAATTTAGGACAGCCCACCATCC
AAAGCTTTGAGCAAGTTGGCACAAAGGTGAATGTGACAGTGGAGGACGAG
CGGACTTTAGTGCGGCGGAACAACACCTTTCTCAGCCTCCGGGATGTGTT
CGGCAAAGATTTAATCTACACACTGTATTACTGGAAGTCCTCTTCCTCCG
GCAAGAAGACAGCTAAAACCAACACAAACGAGTTTTTAATCGACGTGGAT
AAAGGCGAAAACTACTGTTTCAGCGTGCAAGCTGTGATCCCCTCCCGGAC
CGTGAATAGGAAAAGCACCGATAGCCCCGTTGAGTGCATGGGCCAAGAAA
AGGGCGAGTTCCGGGAGAACTGGGTGAACGTCATCAGCGATTTAAAGAAG
ATCGAAGATTTAATTCAGTCCATGCATATCGACGCCACTTTATACACAGA
ATCCGACGTGCACCCCTCTTGTAAGGTGACCGCCATGAAATGTTTTTTAC
TGGAGCTGCAAGTTATCTCTTTAGAGAGCGGAGACGCTAGCATCCACGAC
ACCGTGGAGAATTTAATCATTTTAGCCAATAACTCTTTATCCAGCAACGG
CAACGTGACAGAGTCCGGCTGCAAGGAGTGCGAAGAGCTGGAGGAGAAGA
ACATCAAGGAGTTTCTGCAATCCTTTGTGCACATTGTCCAGATGTTCATC
AATACCTCC.

[0768] In some embodiments, the second chimeric polypeptide can include a sequence that is at least 80% identical (e.g., at least 82% identical, at least 84% identical, at least 86% identical, at least 88% identical, at least 90% identical, at least 92% identical, at least 94% identical, at least 96% identical, at least 98% identical, at least 99% identical, or 100% identical) to:

(SEQ ID NO: 203)
DCDIEGKDGKQYESVLMVSIDQLLDSMKEIGSNCLNNEFNFFKRHICDAN
KEGMFLFRAARKLRQFLKMNSTGDFDLHLLKVSEGTTILLNCTGQVKGRK
PAALGEAQPTKSLEENKSLKEQKKLNDLCFLKRLLQEIKTCWNKILMGTK
EHITCPPPMSVEHADIWVKSYSLYSRERYICNSGFKRKAGTSSLTECVLN
KATNVAHWTTPSLKCIR.

[0769] In some embodiments, a second chimeric polypeptide is encoded by a sequence that is at least 80% identical (e.g., at least 82% identical, at least 84% identical, at least 86% identical, at least 88% identical, at least 90% identical, at least 92% identical, at least 94% identical, at least 96% identical, at least 98% identical, at least 99% identical, or 100% identical) to:

(SEQ ID NO: 204)
GATTGTGATATTGAAGGTAAAGATGGCAAACAATATGAGAGTGTTCTAAT
GGTCAGCATCGATCAATTATTGGACAGCATGAAAGAAATTGGTAGCAATT
GCCTGAATAATGAATTTAACTTTTTTAAAAGACATATCTGTGATGCTAAT
AAGGAAGGTATGTTTTTATTCCGTGCTGCTCGCAAGTTGAGGCAATTTCT
TAAAATGAATAGCACTGGTGATTTTGATCTCCACTTATTAAAAGTTTCAG
AAGGCACAACAATACTGTTGAACTGCACTGGCCAGGTTAAAGGAAGAAAA
CCAGCTGCCCTGGGTGAAGCCCAACCAACAAAGAGTTTGGAAGAAAATAA
ATCTTTAAAGGAACAGAAAAAACTGAATGACTTGTGTTTCCTAAAGAGAC
TATTACAAGAGATAAAAACTTGTTGGAATAAAATTTTGATGGGCACTAAA
GAACACATCACGTGCCCTCCCCCCATGTCCGTGGAACACGCAGACATCTG
GGTCAAGAGCTACAGCTTGTACTCCAGGGAGCGGTACATTTGTAACTCTG
GTTTCAAGCGTAAAGCCGGCACGTCCAGCCTGACGGAGTGCGTGTTGAAC
AAGGCCACGAATGTCGCCCACTGGACAACCCCCAGTCTCAAATGCATTAG
A.

[0770] In some embodiments, a second chimeric polypeptide can include a sequence that is at least 80% identical (e.g., at least 82% identical, at least 84% identical, at least 86% identical, at least 88% identical, at least 90% identical, at least 92% identical, at least 94% identical, at least 96% identical, at least 98% identical, at least 99% identical, or 100% identical) to:

(SEQ ID NO: 250)
MKWVTFISLLFLFSSAYSDCDIEGKDGKQYESVLMVSIDQLLDSMKEIGS
NCLNNEFNFFKRHICDANKEGMFLFRAARKLRQFLKMNSTGDFDLHLLKV
SEGTTILLNCTGQVKGRKPAALGEAQPTKSLEENKSLKEQKKLNDLCFLK
RLLQEIKTCWNKILMGTKEHITCPPPMSVEHADIWVKSYSLYSRERYICN
SGFKRKAGTSSLTECVLNKATNVAHWTTPSLKCIR.

[0771] In some embodiments, a second chimeric polypeptide is encoded by a sequence that is at least 80% identical (e.g., at least 82% identical, at least 84% identical, at least 86% identical, at least 88% identical, at least 90% identical, at least 92% identical, at least 94% identical, at least 96% identical, at least 98% identical, at least 99% identical, or 100% identical) to:

(SEQ ID NO: 251)
ATGAAGTGGGTGACCTTCATCAGCCTGCTGTTCCTGTTCTCCAGCGCCTA
CTCCGATTGCGACATCGAGGGCAAGGACGGCAAGCAGTACGAGAGCGTGC
TGATGGTGTCCATCGACCAGCTGCTGGACAGCATGAAGGAGATCGGCTCC
AACTGCCTCAACAACGAGTTCAACTTCTTCAAGCGGCACATCTGCGACGC
CAACAAGGAGGGCATGTTCCTGTTCAGGGCCGCCAGGAAACTGCGGCAGT
TCCTGAAGATGAACTCCACCGGCGACTTCGACCTGCACCTGCTGAAGGTG
TCCGAGGGCACCACCATCCTGCTGAACTGCACCGGACAGGTGAAGGGCCG
GAAACCTGCTGCTCTGGGAGAGGCCCAACCCACCAAGAGCCTGGAGGAGA
ACAAGTCCCTGAAGGAGCAGAAGAAGCTGAACGACCTGTGCTTCCTGAAG
AGGCTGCTGCAGGAGATCAAGACCTGCTGGAACAAGATCCTGATGGGCAC
CAAGGAGCATATTACATGCCCCCCTCCCATGAGCGTGGAGCACGCCGACA
TCTGGGTGAAGAGCTATAGCCTCTACAGCCGGGAGAGGTATATCTGTAAC
AGCGGCTTCAAGAGGAAGGCCGGCACCAGCAGCCTCACCGAGTGCGTGCT
GAATAAGGCTACCAACGTGGCTCACTGGACAACACCCTCTTTAAAGTGCA
TCCGG.

### Exemplary Multi-Chain Chimeric Polypeptides—Type I

[0772] In some embodiments of any of the multi-chain chimeric polypeptides described herein, the first target-binding domain and the second targeting-binding domain each independently bind specifically to TGF-β. In some examples of these multi-chain chimeric polypeptides, the first target-binding domain and the soluble tissue factor domain directly abut each other in the first chimeric polypeptide. In some examples of these multi-chain chimeric polypeptides, the first chimeric polypeptide further comprises a linker sequence (e.g., any of the exemplary linkers described herein) between the first target-binding domain and the soluble tissue factor domain in the first chimeric polypeptide.

[0773] In some embodiments of these multi-chain chimeric polypeptides, the soluble tissue factor domain and the first domain of the pair of affinity domains directly abut each other in the first chimeric polypeptide. In some embodiments of these multi-chain chimeric polypeptides, the first chimeric polypeptide further includes a linker sequence (e.g., any of the exemplary linkers described herein) between the soluble tissue factor domain and the first domain of the pair of affinity domains in the first chimeric polypeptide.

[0774] In some embodiments of these multi-chain chimeric polypeptides, the second domain of the pair of affinity domains and the second target-binding domain directly abut each other in the second chimeric polypeptide. In some embodiments of these multi-chain chimeric polypeptides, the second chimeric polypeptide further includes a linker sequence (e.g., any of the exemplary linkers described herein) between the second domain of the pair of affinity domains and the second target-binding domain in the second chimeric polypeptide.

[0775] In some embodiments of these multi-chain chimeric polypeptides, the soluble tissue factor domain can be any of the exemplary soluble tissue factor domains described herein. In some embodiments of these multi-chain chimeric polypeptides, the pair of affinity domains can be any of the exemplary pairs of affinity domains described herein.

[0776] In some embodiments of these multi-chain chimeric polypeptides, the first target-binding domain and the second target-binding domain each independently bind specifically to TGF-β. In some embodiments of these multi-chain chimeric polypeptides, the first target-binding domain and the second target-binding domain bind specifically to the same epitope. In some embodiments of these multi-chain chimeric polypeptides, the first target-binding domain and the second target-binding domain include the same amino acid sequence.

[0777] In some embodiments of these multi-chain chimeric polypeptides, the first target-binding domain and the second target-binding domain is a soluble TGF-β receptor (e.g., a soluble TGFβRII receptor, e.g., a soluble human TGFβRII). In some embodiments of these multi-chain chimeric polypeptides, the soluble human TGFRβRII includes a first sequence of soluble human TGFRβRII and a second sequence of soluble human TGFRβRII. In some embodiments of these multi-chain chimeric polypeptides, the soluble human TGFRβRII includes a linker disposed between the first sequence of soluble human TGFRβRII and the second sequence of soluble human TGFRβRII. In some examples of these multi-chain chimeric polypeptides, the linker includes the sequence GGGGSGGGGSGGGGS (SEQ ID NO: 102).

[0778] In some embodiments of these multi-chain chimeric polypeptides, the first sequence of soluble human TGFRβRII receptor comprises a sequence that is at least 80% identical (e.g., at least 82% identical, at least 84% identical, at least 86% identical, at least 88% identical, at least 90% identical, at least 92% identical, at least 94% identical, at least 96% identical, at least 98% identical, at least 99% identical, or 100% identical) to:

(SEQ ID NO: 183)
IPPHVQKSVNNDMIVTDNNGAVKFPQLCKFCDVRFSTCDNQKSCMSNCSI
TSICEKPQEVCVAVWRKNDENITLETVCHDPKLPYHDFILEDAASPKCIM
KEKKKPGETFFMCSCSSDECNDNIIFSEEYNTSNPD.

[0779] In some embodiments of these multi-chain chimeric polypeptides, the second sequence of soluble human TGFRβRII receptor comprises a sequence that is at least 80% identical (e.g., at least 82% identical, at least 84% identical, at least 86% identical, at least 88% identical, at least 90% identical, at least 92% identical, at least 94% identical, at least 96% identical, at least 98% identical, at least 99% identical, or 100% identical) to:

(SEQ ID NO: 184)
IPPHVQKSVNNDMIVTDNNGAVKFPQLCKFCDVRFSTCDNQKSCMSNCSI
TSICEKPQEVCVAVWRKNDENITLETVCHDPKLPYHDFILEDAASPKCIM
KEKKKPGETFFMCSCSSDECNDNIIFSEEYNTSNPD.

[0780] In some embodiments of these multi-chain chimeric polypeptides, the first sequence of soluble human TGFRβRII receptor is encoded by a sequence that is at least 80% identical (e.g., at least 82% identical, at least 84% identical, at least 86% identical, at least 88% identical, at least 90% identical, at least 92% identical, at least 94% identical, at least 96% identical, at least 98% identical, at least 99% identical, or 100% identical) to:

(SEQ ID NO: 185)
ATCCCCCCCCATGTGCAAAAGAGCGTGAACAACGATATGATCGTGACCGA
CAACAACGGCGCCGTGAAGTTTCCCCAGCTCTGCAAGTTCTGCGATGTCA
GGTTCAGCACCTGCGATAATCAGAAGTCCTGCATGTCCAACTGCAGCATC
ACCTCCATCTGCGAGAAGCCCCAAGAAGTGTGCGTGGCCGTGTGGCGGAA
AAATGACGAGAACATCACCCTGGAGACCGTGTGTCACGACCCCAAGCTCC
CTTATCACGACTTCATTCTGGAGGACGCTGCCTCCCCCAAATGCATCATG
AAGGAGAAGAAGAAGCCCGGAGAGACCTTCTTTATGTGTTCCTGTAGCAG
CGACGAGTGTAACGACAACATCATCTTCAGCGAAGAGTACAACACCAGCA
ACCCTGAT.

[0781] In some embodiments of these multi-chain chimeric polypeptides, the second sequence of soluble human TGFRβRII receptor is encoded by a sequence that is at least 80% identical (e.g., at least 82% identical, at least 84% identical, at least 86% identical, at least 88% identical, at least 90% identical, at least 92% identical, at least 94% identical, at least 96% identical, at least 98% identical, at least 99% identical, or 100% identical) to:

(SEQ ID NO: 186)
ATTCCTCCCCACGTGCAGAAGAGCGTGAATAATGACATGATCGTGACCGA
TAACAATGGCGCCGTGAAATTTCCCCAGCTGTGCAAATTCTGCGATGTGA
GGTTTTCCACCTGCGACAACCAGAAGTCCTGTATGAGCAACTGCTCCATC
ACCTCCATCTGTGAGAAGCCTCAGGAGGTGTGCGTGGCTGTCTGGCGGAA
GAATGACGAGAATATCACCCTGGAAACCGTCTGCCACGATCCCAAGCTGC
CCTACCACGATTTCATCCTGGAAGACGCCGCCAGCCCTAAGTGCATCATG
AAAGAGAAAAAGAAGCCTGGCGAGACCTTTTTCATGTGCTCCTGCAGCAG
CGACGAATGCAACGACAATATCATCTTTAGCGAGGAATACAATACCAGCA
ACCCCGAC.

[0782] In some embodiments of these multi-chain chimeric polypeptides, the soluble TGF-β receptor includes a sequence that is at least 80% identical (e.g., at least 82% identical, at least 84% identical, at least 86% identical, at least 88% identical, at least 90% identical, at least 92% identical, at least 94% identical, at least 96% identical, at least 98% identical, at least 99% identical, or 100% identical) to:

(SEQ ID NO: 188)
IPPHVQKSVNNDMIVTDNNGAVKFPQLCKFCDVRFSTCDNQKSCMSNCSI
TSICEKPQEVCVAVWRKNDENITLETVCHDPKLPYHDFILEDAASPKCIM
KEKKKPGETFFMCSCSSDECNDNIIFSEEYNTSNPDGGGGSGGGGSGGGG
SIPPHVQKSVNNDMIVTDNNGAVKFPQLCKFCDVRFSTCDNQKSCMSNCS
ITSICEKPQEVCVAVWRKNDENITLETVCHDPKLPYHDFILEDAASPKCI
MKEKKKPGETFFMCSCSSDECNDNIIFSEEYNTSNPD.

[0783] In some embodiments of these multi-chain chimeric polypeptides, the soluble TGF-β receptor is encoded by a sequence that is at least 80% identical (e.g., at least 82% identical, at least 84% identical, at least 86% identical, at least 88% identical, at least 90% identical, at least 92% identical, at least 94% identical, at least 96% identical, at least 98% identical, at least 99% identical, or 100% identical) to:

(SEQ ID NO: 187)
ATCCCCCCCCATGTGCAAAAGAGCGTGAACAACGATATGATCGTGACCGA
CAACAACGGCGCCGTGAAGTTTCCCCAGCTCTGCAAGTTCTGCGATGTCA
GGTTCAGCACCTGCGATAATCAGAAGTCCTGCATGTCCAACTGCAGCATC
ACCTCCATCTGCGAGAAGCCCCAAGAAGTGTGCGTGGCCGTGTGGCGGAA
AAATGACGAGAACATCACCCTGGAGACCGTGTGTCACGACCCCAAGCTCC
CTTATCACGACTTCATTCTGGAGGACGCTGCCTCCCCCAAATGCATCATG
AAGGAGAAGAAGAAGCCCGGAGAGACCTTCTTTATGTGTTCCTGTAGCAG
CGACGAGTGTAACGACAACATCATCTTCAGCGAAGAGTACAACACCAGCA
ACCCTGATGGAGGTGGCGGATCCGGAGGTGGAGGTTCTGGTGGAGGTGGG
AGTATTCCTCCCCACGTGCAGAAGAGCGTGAATAATGACATGATCGTGAC
CGATAACAATGGCGCCGTGAAATTTCCCCAGCTGTGCAAATTCTGCGATG
TGAGGTTTTCCACCTGCGACAACCAGAAGTCCTGTATGAGCAACTGCTCC
ATCACCTCCATCTGTGAGAAGCCTCAGGAGGTGTGCGTGGCTGTCTGGCG
GAAGAATGACGAGAATATCACCCTGGAAACCGTCTGCCACGATCCCAAGC
TGCCCTACCACGATTTCATCCTGGAAGACGCCGCCAGCCCTAAGTGCATC
ATGAAAGAGAAAAAGAAGCCTGGCGAGACCTTTTTCATGTGCTCCTGCAG
CAGCGACGAATGCAACGACAATATCATCTTTAGCGAGGAATACAATACCA
GCAACCCCGAC.

[0784] In some embodiments, the first chimeric polypeptide can include a sequence that is at least 80% identical (e.g., at least 82% identical, at least 84% identical, at least 86% identical, at least 88% identical, at least 90% identical, at least 92% identical, at least 94% identical, at least 96% identical, at least 98% identical, at least 99% identical, or 100% identical) to:

(SEQ ID NO: 236)
IPPHVQKSVNNDMIVTDNNGAVKFPQLCKFCDVRFSTCDNQKSCMSNCSI
TSICEKPQEVCVAVWRKNDENITLETVCHDPKLPYHDFILEDAASPKCIM
KEKKKPGETFFMCSCSSDECNDNIIFSEEYNTSNPDGGGGSGGGGSGGGG
SIPPHVQKSVNNDMIVTDNNGAVKFPQLCKFCDVRFSTCDNQKSCMSNCS
ITSICEKPQEVCVAVWRKNDENITLETVCHDPKLPYHDFILEDAASPKCI
MKEKKKPGETFFMCSCSSDECNDNIIFSEEYNTSNPDSGTTNTVAAYNLT
WKSTNFKTILEWEPKPVNQVYTVQISTKSGDWKSKCFYTTDTECDLTDEI
VKDVKQTYLARVFSYPAGNVESTGSAGEPLYENSPEFTPYLETNLGQPTI
QSFEQVGTKVNVTVEDERTLVRRNNTFLSLRDVFGKDLIYTLYYWKSSSS
GKKTAKTNTNEFLIDVDKGENYCFSVQAVIPSRTVNRKSTDSPVECMGQE
KGEFRENWVNVISDLKKIEDLIQSMHIDATLYTESDVHPSCKVTAMKCFL
LELQVISLESGDASIHDTVENLIILANNSLSSNGNVTESGCKECEELEEK
NIKEFLQSFVHIVQMFINTS.

[0785] In some embodiments, a first chimeric polypeptide is encoded by a sequence that is at least 80% identical (e.g., at least 82% identical, at least 84% identical, at least 86% identical, at least 88% identical, at least 90% identical, at least 92% identical, at least 94% identical, at least 96% identical, at least 98% identical, at least 99% identical, or 100% identical) to:

(SEQ ID NO: 237)
ATCCCCCCCCATGTGCAAAAGAGCGTGAACAACGATATGATCGTGACCGA
CAACAACGGCGCCGTGAAGTTTCCCCAGCTCTGCAAGTTCTGCGATGTCA
GGTTCAGCACCTGCGATAATCAGAAGTCCTGCATGTCCAACTGCAGCATC
ACCTCCATCTGCGAGAAGCCCCAAGAAGTGTGCGTGGCCGTGTGGCGGAA
AAATGACGAGAACATCACCCTGGAGACCGTGTGTCACGACCCCAAGCTCC
CTTATCACGACTTCATTCTGGAGGACGCTGCCTCCCCCAAATGCATCATG
AAGGAGAAGAAGAAGCCCGGAGAGACCTTCTTTATGTGTTCCTGTAGCAG
CGACGAGTGTAACGACAACATCATCTTCAGCGAAGAGTACAACACCAGCA
ACCCTGATGGAGGTGGCGGATCCGGAGGTGGAGGTTCTGGTGGAGGTGGG
AGTATTCCTCCCCACGTGCAGAAGAGCGTGAATAATGACATGATCGTGAC
CGATAACAATGGCGCCGTGAAATTTCCCCAGCTGTGCAAATTCTGCGATG
TGAGGTTTTCCACCTGCGACAACCAGAAGTCCTGTATGAGCAACTGCTCC
ATCACCTCCATCTGTGAGAAGCCTCAGGAGGTGTGCGTGGCTGTCTGGCG
GAAGAATGACGAGAATATCACCCTGGAAACCGTCTGCCACGATCCCAAGC
TGCCCTACCACGATTTCATCCTGGAAGACGCCGCCAGCCCTAAGTGCATC
ATGAAAGAGAAAAAGAAGCCTGGCGAGACCTTTTTCATGTGCTCCTGCAG
CAGCGACGAATGCAACGACAATATCATCTTTAGCGAGGAATACAATACCA
GCAACCCCGACAGCGGCACAACCAACACAGTCGCTGCCTATAACCTCACT
TGGAAGAGCACCAACTTCAAAACCATCCTCGAATGGGAACCCAAACCCGT
TAACCAAGTTTACACCGTGCAGATCAGCACCAAGTCCGGCGACTGGAAGT
CCAAATGTTTCTATACCACCGACACCGAGTGCGATCTCACCGATGAGATC
GTGAAAGATGTGAAACAGACCTACCTCGCCCGGGTGTTTAGCTACCCCGC
CGGCAATGTGGAGAGCACTGGTTCCGCTGGCGAGCCTTTATACGAGAACA
GCCCCGAATTTACCCCTTACCTCGAGACCAATTTAGGACAGCCCACCATC
CAAAGCTTTGAGCAAGTTGGCACAAAGGTGAATGTGACAGTGGAGGACGA
GCGGACTTTAGTGCGGCGGAACAACACCTTTCTCAGCCTCCGGGATGTGT
TCGGCAAAGATTTAATCTACACACTGTATTACTGGAAGTCCTCTTCCTCC
GGCAAGAAGACAGCTAAAACCAACACAAACGAGTTTTTAATCGACGTGGA
TAAAGGCGAAAACTACTGTTTCAGCGTGCAAGCTGTGATCCCCTCCCGGA
CCGTGAATAGGAAAAGCACCGATAGCCCCGTTGAGTGCATGGGCCAAGAA
AAGGGCGAGTTCCGGGAGAACTGGGTGAACGTCATCAGCGATTTAAAGAA
GATCGAAGATTTAATTCAGTCCATGCATATCGACGCCACTTTATACACAG
AATCCGACGTGCACCCCTCTTGTAAGGTGACCGCCATGAAATGTTTTTTA
CTGGAGCTGCAAGTTATCTCTTTAGAGAGCGGAGACGCTAGCATCCACGA
CACCGTGGAGAATTTAATCATTTTAGCCAATAACTCTTTATCCAGCAACG
GCAACGTGACAGAGTCCGGCTGCAAGGAGTGCGAAGAGCTGGAGGAGAAG
AACATCAAGGAGTTTCTGCAATCCTTTGTGCACATTGTCCAGATGTTCAT
CAATACCTCC.

[0786] In some embodiments, a first chimeric polypeptide can include a sequence that is at least 80% identical (e.g., at least 82% identical, at least 84% identical, at least 86% identical, at least 88% identical, at least 90% identical, at least 92% identical, at least 94% identical, at least 96% identical, at least 98% identical, at least 99% identical, or 100% identical) to:

(SEQ ID NO: 238)
MKWVTFISLLFLFSSAYSIPPHVQKSVNNDMIVTDNNGAVKFPQLCKFCD
VRFSTCDNQKSCMSNCSITSICEKPQEVCVAVWRKNDENITLETVCHDPK
LPYHDFILEDAASPKCIMKEKKKPGETFFMCSCSSDECNDNIIFSEEYNT
SNPDGGGGSGGGGSGGGGSIPPHVQKSVNNDMIVTDNNGAVKFPQLCKFC
DVRFSTCDNQKSCMSNCSITSICEKPQEVCVAVWRKNDENITLETVCHDP
KLPYHDFILEDAASPKCIMKEKKKPGETFFMCSCSSDECNDNIIFSEEYN
TSNPDSGTTNTVAAYNLTWKSTNFKTILEWEPKPVNQVYTVQISTKSGDW
KSKCFYTTDTECDLTDEIVKDVKQTYLARVFSYPAGNVESTGSAGEPLYE
NSPEFTPYLETNLGQPTIQSFEQVGTKVNVTVEDERTLVRRNNTFLSLRD
VFGKDLIYTLYYWKSSSSGKKTAKTNTNEFLIDVDKGENYCFSVQAVIPS
RTVNRKSTDSPVECMGQEKGEFRENWVNVISDLKKIEDLIQSMHIDATLY
TESDVHPSCKVTAMKCFLLELQVISLESGDASIHDTVENLIILANNSLSS
NGNVTESGCKECEELEEKNIKEFLQSFVHIVQMFINTS.

[0787] In some embodiments, a first chimeric polypeptide is encoded by a sequence that is at least 80% identical (e.g., at least 82% identical, at least 84% identical, at least 86% identical, at least 88% identical, at least 90% identical, at least 92% identical, at least 94% identical, at least 96% identical, at least 98% identical, at least 99% identical, or 100% identical) to:

(SEQ ID NO: 239)
ATGAAGTGGGTGACCTTCATCAGCCTGCTGTTCCTGTTCTCCAGCGCCTA
CTCCATCCCCCCCCATGTGCAAAAGAGCGTGAACAACGATATGATCGTGA
CCGACAACAACGGCGCCGTGAAGTTTCCCCAGCTCTGCAAGTTCTGCGAT
GTCAGGTTCAGCACCTGCGATAATCAGAAGTCCTGCATGTCCAACTGCAG
CATCACCTCCATCTGCGAGAAGCCCCAAGAAGTGTGCGTGGCCGTGTGGC
GGAAAAATGACGAGAACATCACCCTGGAGACCGTGTGTCACGACCCCAAG
CTCCCTTATCACGACTTCATTCTGGAGGACGCTGCCTCCCCCAAATGCAT
CATGAAGGAGAAGAAGAAGCCCGGAGAGACCTTCTTTATGTGTTCCTGTA
GCAGCGACGAGTGTAACGACAACATCATCTTCAGCGAAGAGTACAACACC
AGCAACCCTGATGGAGGTGGCGGATCCGGAGGTGGAGGTTCTGGTGGAGG
TGGGAGTATTCCTCCCCACGTGCAGAAGAGCGTGAATAATGACATGATCG
TGACCGATAACAATGGCGCCGTGAAATTTCCCCAGCTGTGCAAATTCTGC
GATGTGAGGTTTTCCACCTGCGACAACCAGAAGTCCTGTATGAGCAACTG
CTCCATCACCTCCATCTGTGAGAAGCCTCAGGAGGTGTGCGTGGCTGTCT
GGCGGAAGAATGACGAGAATATCACCCTGGAAACCGTCTGCCACGATCCC
AAGCTGCCCTACCACGATTTCATCCTGGAAGACGCCGCCAGCCCTAAGTG
CATCATGAAAGAGAAAAAGAAGCCTGGCGAGACCTTTTTCATGTGCTCCT
GCAGCAGCGACGAATGCAACGACAATATCATCTTTAGCGAGGAATACAAT
ACCAGCAACCCCGACAGCGGCACAACCAACACAGTCGCTGCCTATAACCT
CACTTGGAAGAGCACCAACTTCAAAACCATCCTCGAATGGGAACCCAAAC
CCGTTAACCAAGTTTACACCGTGCAGATCAGCACCAAGTCCGGCGACTGG
AAGTCCAAATGTTTCTATACCACCGACACCGAGTGCGATCTCACCGATGA
GATCGTGAAAGATGTGAAACAGACCTACCTCGCCCGGGTGTTTAGCTACC
CCGCCGGCAATGTGGAGAGCACTGGTTCCGCTGGCGAGCCTTTATACGAG
AACAGCCCCGAATTTACCCCTTACCTCGAGACCAATTTAGGACAGCCCAC
CATCCAAAGCTTTGAGCAAGTTGGCACAAAGGTGAATGTGACAGTGGAGG
ACGAGCGGACTTTAGTGCGGCGGAACAACACCTTTCTCAGCCTCCGGGAT
GTGTTCGGCAAAGATTTAATCTACACACTGTATTACTGGAAGTCCTCTTC
CTCCGGCAAGAAGACAGCTAAAACCAACACAAACGAGTTTTTAATCGACG
TGGATAAAGGCGAAAACTACTGTTTCAGCGTGCAAGCTGTGATCCCCTCC
CGGACCGTGAATAGGAAAAGCACCGATAGCCCCGTTGAGTGCATGGGCCA
AGAAAAGGGCGAGTTCCGGGAGAACTGGGTGAACGTCATCAGCGATTTAA
AGAAGATCGAAGATTTAATTCAGTCCATGCATATCGACGCCACTTTATAC
ACAGAATCCGACGTGCACCCCTCTTGTAAGGTGACCGCCATGAAATGTTT
TTTACTGGAGCTGCAAGTTATCTCTTTAGAGAGCGGAGACGCTAGCATCC
ACGACACCGTGGAGAATTTAATCATTTTAGCCAATAACTCTTTATCCAGC
AACGGCAACGTGACAGAGTCCGGCTGCAAGGAGTGCGAAGAGCTGGAGGA
GAAGAACATCAAGGAGTTTCTGCAATCCTTTGTGCACATTGTCCAGATGT
TCATCAATACCTCC.

[0788] In some embodiments, the second chimeric polypeptide can include a sequence that is at least 80% identical (e.g., at least 82% identical, at least 84% identical, at least 86% identical, at least 88% identical, at least 90% identical, at least 92% identical, at least 94% identical, at least 96% identical, at least 98% identical, at least 99% identical, or 100% identical) to:

(SEQ ID NO: 193)
IPPHVQKSVNNDMIVTDNNGAVKFPQLCKFCDVRFSTCDNQKSCMSNCSI
TSICEKPQEVCVAVWRKNDENITLETVCHDPKLPYHDFILEDAASPKCIM
KEKKKPGETFFMCSCSSDECNDNIIFSEEYNTSNPDGGGGSGGGGSGGGG
SIPPHVQKSVNNDMIVTDNNGAVKFPQLCKFCDVRFSTCDNQKSCMSNCS
ITSICEKPQEVCVAVWRKNDENITLETVCHDPKLPYHDFILEDAASPKCI
MKEKKKPGETFFMCSCSSDECNDNIIFSEEYNTSNPDITCPPPMSVEHAD
IWVKSYSLYSRERYICNSGFKRKAGTSSLTECVLNKATNVAHWTTPSLKC
IR.

[0789] In some embodiments, a second chimeric polypeptide is encoded by a sequence that is at least 80% identical (e.g., at least 82% identical, at least 84% identical, at least 86% identical, at least 88% identical, at least 90% identical, at least 92% identical, at least 94% identical, at least 96% identical, at least 98% identical, at least 99% identical, or 100% identical) to:

(SEQ ID NO: 257)
ATCCCCCCCCATGTGCAAAAGAGCGTGAACAACGATATGATCGTGACCGA
CAACAACGGCGCCGTGAAGTTTCCCCAGCTCTGCAAGTTCTGCGATGTCA
GGTTCAGCACCTGCGATAATCAGAAGTCCTGCATGTCCAACTGCAGCATC
ACCTCCATCTGCGAGAAGCCCCAAGAAGTGTGCGTGGCCGTGTGGCGGAA
AAATGACGAGAACATCACCCTGGAGACCGTGTGTCACGACCCCAAGCTCC
CTTATCACGACTTCATTCTGGAGGACGCTGCCTCCCCCAAATGCATCATG
AAGGAGAAGAAGAAGCCCGGAGAGACCTTCTTTATGTGTTCCTGTAGCAG
CGACGAGTGTAACGACAACATCATCTTCAGCGAAGAGTACAACACCAGCA
ACCCTGATGGAGGTGGCGGATCCGGAGGTGGAGGTTCTGGTGGAGGTGGG
AGTATTCCTCCCCACGTGCAGAAGAGCGTGAATAATGACATGATCGTGAC
CGATAACAATGGCGCCGTGAAATTTCCCCAGCTGTGCAAATTCTGCGATG
TGAGGTTTTCCACCTGCGACAACCAGAAGTCCTGTATGAGCAACTGCTCC
ATCACCTCCATCTGTGAGAAGCCTCAGGAGGTGTGCGTGGCTGTCTGGCG
GAAGAATGACGAGAATATCACCCTGGAAACCGTCTGCCACGATCCCAAGC
TGCCCTACCACGATTTCATCCTGGAAGACGCCGCCAGCCCTAAGTGCATC
ATGAAAGAGAAAAAGAAGCCTGGCGAGACCTTTTTCATGTGCTCCTGCAG
CAGCGACGAATGCAACGACAATATCATCTTTAGCGAGGAATACAATACCA
GCAACCCCGACATTACATGCCCCCCTCCCATGAGCGTGGAGCACGCCGAC
ATCTGGGTGAAGAGCTATAGCCTCTACAGCCGGGAGAGGTATATCTGTAA
CAGCGGCTTCAAGAGGAAGGCCGGCACCAGCAGCCTCACCGAGTGCGTGC
TGAATAAGGCTACCAACGTGGCTCACTGGACAACACCCTCTTTAAAGTGC
ATCCGG.

[0790] In some embodiments, a second chimeric polypeptide can include a sequence that is at least 80% identical (e.g., at least 82% identical, at least 84% identical, at least 86% identical, at least 88% identical, at least 90% identical, at least 92% identical, at least 94% identical, at least 96% identical, at least 98% identical, at least 99% identical, or 100% identical) to:

(SEQ ID NO: 195)
MKWVTFISLLFLFSSAYSIPPHVQKSVNNDMIVTDNNGAVKFPQLCKFCD
VRFSTCDNQKSCMSNCSITSICEKPQEVCVAVWRKNDENITLETVCHDPK
LPYHDFILEDAASPKCIMKEKKKPGETFFMCSCSSDECNDNIIFSEEYNT
SNPDGGGGSGGGGSGGGGSIPPHVQKSVNNDMIVTDNNGAVKFPQLCKFC
DVRFSTCDNQKSCMSNCSITSICEKPQEVCVAVWRKNDENITLETVCHDP
KLPYHDFILEDAASPKCIMKEKKKPGETFFMCSCSSDECNDNIIFSEEYN
TSNPDITCPPPMSVEHADIWVKSYSLYSRERYICNSGFKRKAGTSSLTEC
VLNKATNVAHWTTPSLKCIR.

[0791] In some embodiments, a second chimeric polypeptide is encoded by a sequence that is at least 80% identical (e.g., at least 82% identical, at least 84% identical, at least 86% identical, at least 88% identical, at least 90% identical, at least 92% identical, at least 94% identical, at least 96% identical, at least 98% identical, at least 99% identical, or 100% identical) to:

(SEQ ID NO: 259)
ATGAAGTGGGTGACCTTCATCAGCCTGCTGTTCCTGTTCTCCAGCGCCTA
CTCCATCCCCCCCCATGTGCAAAAGAGCGTGAACAACGATATGATCGTGA
CCGACAACAACGGCGCCGTGAAGTTTCCCCAGCTCTGCAAGTTCTGCGAT
GTCAGGTTCAGCACCTGCGATAATCAGAAGTCCTGCATGTCCAACTGCAG
CATCACCTCCATCTGCGAGAAGCCCCAAGAAGTGTGCGTGGCCGTGTGGC
GGAAAAATGACGAGAACATCACCCTGGAGACCGTGTGTCACGACCCCAAG
CTCCCTTATCACGACTTCATTCTGGAGGACGCTGCCTCCCCCAAATGCAT
CATGAAGGAGAAGAAGAAGCCCGGAGAGACCTTCTTTATGTGTTCCTGTA
GCAGCGACGAGTGTAACGACAACATCATCTTCAGCGAAGAGTACAACACC
AGCAACCCTGATGGAGGTGGCGGATCCGGAGGTGGAGGTTCTGGTGGAGG
TGGGAGTATTCCTCCCCACGTGCAGAAGAGCGTGAATAATGACATGATCG
TGACCGATAACAATGGCGCCGTGAAATTTCCCCAGCTGTGCAAATTCTGC
GATGTGAGGTTTTCCACCTGCGACAACCAGAAGTCCTGTATGAGCAACTG
CTCCATCACCTCCATCTGTGAGAAGCCTCAGGAGGTGTGCGTGGCTGTCT
GGCGGAAGAATGACGAGAATATCACCCTGGAAACCGTCTGCCACGATCCC
AAGCTGCCCTACCACGATTTCATCCTGGAAGACGCCGCCAGCCCTAAGTG
CATCATGAAAGAGAAAAAGAAGCCTGGCGAGACCTTTTTCATGTGCTCCT
GCAGCAGCGACGAATGCAACGACAATATCATCTTTAGCGAGGAATACAAT
ACCAGCAACCCCGACATTACATGCCCCCCTCCCATGAGCGTGGAGCACGC
CGACATCTGGGTGAAGAGCTATAGCCTCTACAGCCGGGAGAGGTATATCT
GTAACAGCGGCTTCAAGAGGAAGGCCGGCACCAGCAGCCTCACCGAGTGC
GTGCTGAATAAGGCTACCAACGTGGCTCACTGGACAACACCCTCTTTAAA
GTGCATCCGG.

### Exemplary Multi-Chain Chimeric Polypeptides—Type J

[0792] In some embodiments of any of the multi-chain chimeric polypeptides described herein, the first target-binding domain and the second targeting-binding domain each independently bind specifically to a receptor of IL-7, a receptor of IL-21, or a receptor of CD137L. In some embodiments of these multi-chain chimeric polypeptides described herein, the second chimeric polypeptide further includes the additional target-binding domain. In some embodiments of these multi-chain chimeric polypeptides described herein, the additional target-binding domain binds specifically to a receptor for IL-21 (e.g., a soluble IL-21, e.g., a soluble human IL-21) or a receptor for CD137L (e.g., a soluble CD137L, e.g., a soluble human CD137L).

[0793] In some examples of these multi-chain chimeric polypeptides, the first target-binding domain and the soluble tissue factor domain directly abut each other in the first chimeric polypeptide. In some examples of these multi-chain chimeric polypeptides, the first chimeric polypeptide further comprises a linker sequence (e.g., any of the exemplary linkers described herein) between the first target-binding domain and the soluble tissue factor domain in the first chimeric polypeptide.

[0794] In some embodiments of these multi-chain chimeric polypeptides, the soluble tissue factor domain and the first domain of the pair of affinity domains directly abut each other in the first chimeric polypeptide. In some embodiments of these multi-chain chimeric polypeptides, the first chimeric polypeptide further includes a linker sequence (e.g., any of the exemplary linkers described herein) between the soluble tissue factor domain and the first domain of the pair of affinity domains in the first chimeric polypeptide.

[0795] In some embodiments of these multi-chain chimeric polypeptides, the second domain of the pair of affinity domains and the second target-binding domain directly abut each other in the second chimeric polypeptide. In some embodiments of these multi-chain chimeric polypeptides, the second chimeric polypeptide further includes a linker sequence (e.g., any of the exemplary linkers described herein) between the second domain of the pair of affinity domains and the second target-binding domain in the second chimeric polypeptide.

[0796] In some embodiments, the second chimeric polypeptide further comprises one or more additional target-binding domains at the N-terminal end or the C-terminal end of the second chimeric polypeptide.

[0797] In some embodiments of these multi-chain chimeric polypeptides, the additional target-binding domain and the second domain of the pair of affinity domains directly abut each other in the second chimeric polypeptide. In some embodiments of these multi-chain chimeric polypeptides, the second chimeric polypeptide further includes a linker sequence (e.g., any of the exemplary linkers described herein) between the second domain of the pair of affinity domains and the additional target-binding domain in the second chimeric polypeptide.

[0798] In some embodiments of these multi-chain chimeric polypeptides, the additional target-binding domain and the second target-binding domain directly abut each other in the second chimeric polypeptide. In some embodiments of these multi-chain chimeric polypeptides, the second chimeric polypeptide further includes a linker sequence (e.g., any of the exemplary linkers described herein) between the second target-binding domain and the additional target-binding domain in the second chimeric polypeptide.

[0799] In some embodiments of these multi-chain chimeric polypeptides, the soluble tissue factor domain can be any of the exemplary soluble tissue factor domains described herein. In some embodiments of these multi-chain chimeric polypeptides, the pair of affinity domains can be any of the exemplary pairs of affinity domains described herein.

[0800] In some embodiments, the second chimeric polypeptide can include an additional target-binding domain. In some embodiments, the additional target-binding domain and the

[0801] In some embodiments of these multi-chain chimeric polypeptides, one or more of the first target-binding domain, the second target-binding domain and the additional target-binding domain is an agonistic antigen-binding domain. In some embodiments of these multi-chain chimeric polypeptides, the first target-binding domain, the second target-binding domain, and the additional target-binding domain are each agonistic antigen-binding domains. In some embodiments of these multi-chain chimeric polypeptides, the antigen-binding domain includes a scFv or single-domain antibody.

[0802] In some embodiments of these multi-chain chimeric polypeptides, the first target-binding domain binds specifically to a receptor for IL-7, and the second target-binding domain binds specifically to a receptor for IL-21 or a receptor for CD137L. In some embodiments, the additional target-binding domain binds specifically to a receptor for IL-21 or a receptor for CD137L.

[0803] In some embodiments of these multi-chain chimeric polypeptides, the first target-binding domain is a soluble IL-7 (e.g., a soluble human IL-7). In some embodiments of these multi-chain chimeric polypeptides, the soluble human IL-7 includes a sequence that is at least 80% identical (e.g., at least 82% identical, at least 84% identical, at least 86% identical, at least 88% identical, at least 90% identical, at least 92% identical, at least 94% identical, at least 96% identical, at least 98% identical, at least 99% identical, or 100% identical) to:

(SEQ ID NO: 79)
DCDIEGKDGKQYESVLMVSIDQLLDSMKEIGSNCLNNEFNEFKRHICDAN
KEGMFLFRAARKLRQFLKMNSTGDFDLHLLKVSEGTTILLNCTGQVKGRK
PAALGEAQPTKSLEENKSLKEQKKLNDLCFLKRLLQEIKTCWNKILMGTK
EH.

[0804] In some embodiments of these multi-chain chimeric polypeptides, the soluble human IL-7 is encoded by a sequence that is at least 80% identical (e.g., at least 82% identical, at least 84% identical, at least 86% identical, at least 88% identical, at least 90% identical, at least 92% identical, at least 94% identical, at least 96% identical, at least 98% identical, at least 99% identical, or 100% identical) to:

(SEQ ID NO: 227)
GATTGCGACATCGAGGGCAAGGACGGCAAGCAGTACGAGAGCGTGCTGAT
GGTGTCCATCGACCAGCTGCTGGACAGCATGAAGGAGATCGGCTCCAACT
GCCTCAACAACGAGTTCAACTTCTTCAAGCGGCACATCTGCGACGCCAAC
AAGGAGGGCATGTTCCTGTTCAGGGCCGCCAGGAAACTGCGGCAGTTCCT
GAAGATGAACTCCACCGGCGACTTCGACCTGCACCTGCTGAAGGTGTCCG
AGGGCACCACCATCCTGCTGAACTGCACCGGACAGGTGAAGGGCCGGAAA
CCTGCTGCTCTGGGAGAGGCCCAACCCACCAAGAGCCTGGAGGAGAACAA
GTCCCTGAAGGAGCAGAAGAAGCTGAACGACCTGTGCTTCCTGAAGAGGC
TGCTGCAGGAGATCAAGACCTGCTGGAACAAGATCCTGATGGGCACCAAG
GAGCAT.

[0805] In some embodiments of these multi-chain chimeric polypeptides, the second target-binding domain or the additional target-binding domain binds specifically to a receptor for IL-21. In some embodiments of these multi-chain chimeric polypeptides, the second target-binding domain or the additional target-binding domain is a soluble IL-21 (e.g., a soluble human IL-21).

[0806] In some embodiments of these multi-chain chimeric polypeptides, a soluble human IL-21 includes a sequence that is at least 80% identical (e.g., at least 82% identical, at least 84% identical, at least 86% identical, at least 88% identical, at least 90% identical, at least 92% identical, at least 94% identical, at least 96% identical, at least 98% identical, at least 99% identical, or 100% identical) to:

(SEQ ID NO: 83)
[sequence omitted]

[0807] In some embodiments of these multi-chain chimeric polypeptides, a soluble human IL-21 is encoded by a sequence that is at least 80% identical (e.g., at least 82% identical, at least 84% identical, at least 86% identical, at least 88% identical, at least 90% identical, at least 92% identical, at least 94% identical, at least 96% identical, at least 98% identical, at least 99% identical, or 100% identical) to:

(SEQ ID NO: 182)
CAGGGCCAGGACAGGCACATGATCCGGATGAGGCAGCTCATCGACATCGT
CGACCAGCTGAAGAACTACGTGAACGACCTGGTGCCCGAGTTTCTGCCTG
CCCCCGAGGACGTGGAGACCAACTGCGAGTGGTCCGCCTTCTCCTGCTTT
CAGAAGGCCCAGCTGAAGTCCGCCAACACCGGCAACAACGAGCGGATCAT
CAACGTGAGCATCAAGAAGCTGAAGCGGAAGCCTCCCTCCACAAACGCCG
GCAGGAGGCAGAAGCACAGGCTGACCTGCCCCAGCTGTGACTCCTACGAG
AAGAAGCCCCCCAAGGAGTTCCTGGAGAGGTTCAAGTCCCTGCTGCAGAA
GATGATCCATCAGCACCTGTCCTCCAGGACCCACGGCTCCGAGGACTCC.

[0808] In some embodiments of these multi-chain chimeric polypeptides, the second target-binding domain binds specifically to a receptor for CD137L. In some embodiments of these multi-chain chimeric polypeptides, the second chimeric polypeptide further comprises an additional target-binding domain that binds specifically to a receptor for CD137L. In some embodiments of these multi-chain chimeric polypeptides, the second target-binding domain and/or the additional target-binding domain is a soluble CD137L (e.g., a soluble human CD137L).

[0809] In some embodiments of these multi-chain chimeric polypeptides, a soluble human CD137L includes a sequence that is at least 80% identical (e.g., at least 82% identical, at least 84% identical, at least 86% identical, at least 88% identical, at least 90% identical, at least 92% identical, at least 94% identical, at least 96% identical, at least 98% identical, at least 99% identical, or 100% identical) to:

(SEQ ID NO: 260)
REGPELSPDDPAGLLDLRQGMFAQLVAQNVLLIDGPLSWYSDPGLAGVSL
TGGLSYKEDTKELVVAKAGVYYVFFQLELRRVVAGEGSGSVSLALHLQPL
RSAAGAAALALTVDLPPASSEARNSAFGFQGRLLHLSAGQRLGVHLHTEA
RARHAWQLTQGATVLGLFRVTPEIPAGLPSPRSE.

[0810] In some embodiments of these multi-chain chimeric polypeptides, a soluble human CD137L is encoded by a sequence that is at least 80% identical (e.g., at least 82% identical, at least 84% identical, at least 86% identical, at least 88% identical, at least 90% identical, at least 92% identical, at least 94% identical, at least 96% identical, at least 98% identical, at least 99% identical, or 100% identical) to:

(SEQ ID NO: 261)
CGCGAGGGTCCCGAGCTTTCGCCCGACGATCCCGCCGGCCTCTTGGACCT
GCGGCAGGGCATGTTTGCGCAGCTGGTGGCCCAAAATGTTCTGCTGATCG
ATGGGCCCCTGAGCTGGTACAGTGACCCAGGCCTGGCAGGCGTGTCCCTG
ACGGGGGGCCTGAGCTACAAAGAGGACACGAAGGAGCTGGTGGTGGCCAA
GGCTGGAGTCTACTATGTCTTCTTTCAACTAGAGCTGCGGCGCGTGGTGG
CCGGCGAGGGCTCAGGCTCCGTTTCACTTGCGCTGCACCTGCAGCCACTG
CGCTCTGCTGCTGGGGCCGCCGCCCTGGCTTTGACCGTGGACCTGCCACC
CGCCTCCTCCGAGGCTCGGAACTCGGCCTTCGGTTTCCAGGGCCGCTTGC
TGCACCTGAGTGCCGGCCAGCGCCTGGGCGTCCATCTTCACACTGAGGCC
AGGGCACGCCATGCCTGGCAGCTTACCCAGGGCGCCACAGTCTTGGGACT
CTTCCGGGTGACCCCCGAAATCCCAGCCGGACTCCCTTCACCGAGGTCGG
AA.

[0811] In some embodiments of these multi-chain chimeric polypeptides, a soluble human CD137L includes a sequence that is at least 80% identical (e.g., at least 82% identical, at least 84% identical, at least 86% identical, at least 88% identical, at least 90% identical, at least 92% identical, at least 94% identical, at least 96% identical, at least 98% identical, at least 99% identical, or 100% identical) to:

(SEQ ID NO: 262)
DPAGLLDLRQGMFAQLVAQNVLLIDGPLSWYSDPGLAGVSLTGGLSYKED
TKELVVAKAGVYYVFFQLELRRVVAGEGSGSVSLALHLQPLRSAAGAAAL
ALTVDLPPASSEARNSAFGFQGRLLHLSAGQRLGVHLHTEARARHAWQLT
QGATVLGLFRVTPEI.

[0812] In some embodiments of these multi-chain chimeric polypeptides, a soluble human CD137L is encoded by a sequence that is at least 80% identical (e.g., at least 82% identical, at least 84% identical, at least 86% identical, at least 88% identical, at least 90% identical, at least 92% identical, at least 94% identical, at least 96% identical, at least 98% identical, at least 99% identical, or 100% identical) to:

(SEQ ID NO: 263)
GATCCCGCCGGCCTCTTGGACCTGCGGCAGGGCATGTTTGCGCAGCTGGT
GGCCCAAAATGTTCTGCTGATCGATGGGCCCCTGAGCTGGTACAGTGACC
CAGGCCTGGCAGGCGTGTCCCTGACGGGGGGCCTGAGCTACAAAGAGGAC
ACGAAGGAGCTGGTGGTGGCCAAGGCTGGAGTCTACTATGTCTTCTTTCA
ACTAGAGCTGCGGCGCGTGGTGGCCGGCGAGGGCTCAGGCTCCGTTTCAC
TTGCGCTGCACCTGCAGCCACTGCGCTCTGCTGCTGGGGCCGCCGCCCTG
GCTTTGACCGTGGACCTGCCACCCGCCTCCTCCGAGGCTCGGAACTCGGC
CTTCGGTTTCCAGGGCCGCTTGCTGCACCTGAGTGCCGGCCAGCGCCTGG
GCGTCCATCTTCACACTGAGGCCAGGGCACGCCATGCCTGGCAGCTTACC
CAGGGCGCCACAGTCTTGGGACTCTTCCGGGTGACCCCCGAAATC.

[0813] In some embodiments, the first chimeric polypeptide can include a sequence that is at least 80% identical (e.g., at least 82% identical, at least 84% identical, at least 86% identical, at least 88% identical, at least 90% identical, at least 92% identical, at least 94% identical, at least 96% identical, at least 98% identical, at least 99% identical, or 100% identical) to:

(SEQ ID NO: 207)
DCDIEGKDGKQYESVLMVSIDQLLDSMKEIGSNCLNNEFNEFKRHICDAN
KEGMFLFRAARKLRQFLKMNSTGDFDLHLLKVSEGTTILLNCTGQVKGRK
PAALGEAQPTKSLEENKSLKEQKKLNDLCFLKRLLQEIKTCWNKILMGTK
EHSGTTNTVAAYNLTWKSTNFKTILEWEPKPVNQVYTVQISTKSGDWKSK
CFYTTDTECDLTDEIVKDVKQTYLARVFSYPAGNVESTGSAGEPLYENSP
EFTPYLETNLGQPTIQSFEQVGTKVNVTVEDERTLVRRNNTFLSLRDVFG
KDLIYTLYYWKSSSSGKKTAKTNTNEFLIDVDKGENYCFSVQAVIPSRTV
NRKSTDSPVECMGQEKGEFRENWVNVISDLKKIEDLIQSMHIDATLYTES
DVHPSCKVTAMKCFLLELQVISLESGDASIHDTVENLIILANNSLSSNGN
VTESGCKECEELEEKNIKEFLQSFVHIVQMFINTS.

[0814] In some embodiments, a first chimeric polypeptide is encoded by a sequence that is at least 80% identical (e.g., at least 82% identical, at least 84% identical, at least 86% identical, at least 88% identical, at least 90% identical, at least 92% identical, at least 94% identical, at least 96% identical, at least 98% identical, at least 99% identical, or 100% identical) to:

(SEQ ID NO: 208)
GATTGCGACATCGAGGGCAAGGACGGCAAGCAGTACGAGAGCGTGCTGATG
GTGTCCATCGACCAGCTGCTGGACAGCATGAAGGAGATCGGCTCCAACTGC
CTCAACAACGAGTTCAACTTCTTCAAGCGGCACATCTGCGACGCCAACAAG
GAGGGCATGTTCCTGTTCAGGGCCGCCAGGAAACTGCGGCAGTTCCTGAAG
ATGAACTCCACCGGCGACTTCGACCTGCACCTGCTGAAGGTGTCCGAGGGC
ACCACCATCCTGCTGAACTGCACCGGACAGGTGAAGGGCCGGAAACCTGCT
GCTCTGGGAGAGGCCCAACCCACCAAGAGCCTGGAGGAGAACAAGTCCCTG
AAGGAGCAGAAGAAGCTGAACGACCTGTGCTTCCTGAAGAGGCTGCTGCAG
GAGATCAAGACCTGCTGGAACAAGATCCTGATGGGCACCAAGGAGCATAGC
GGCACAACCAACACAGTCGCTGCCTATAACCTCACTTGGAAGAGCACCAAC
TTCAAAACCATCCTCGAATGGGAACCCAAACCCGTTAACCAAGTTTACACC
GTGCAGATCAGCACCAAGTCCGGCGACTGGAAGTCCAAATGTTTCTATACC
ACCGACACCGAGTGCGATCTCACCGATGAGATCGTGAAAGATGTGAAACAG
ACCTACCTCGCCCGGGTGTTTAGCTACCCCGCCGGCAATGTGGAGAGCACT
GGTTCCGCTGGCGAGCCTTTATACGAGAACAGCCCCGAATTTACCCCTTAC
CTCGAGACCAATTTAGGACAGCCCACCATCCAAAGCTTTGAGCAAGTTGGC
ACAAAGGTGAATGTGACAGTGGAGGACGAGCGGACTTTAGTGCGGCGGAAC
AACACCTTTCTCAGCCTCCGGGATGTGTTCGGCAAAGATTTAATCTACACA
CTGTATTACTGGAAGTCCTCTTCCTCCGGCAAGAAGACAGCTAAAACCAAC
ACAAACGAGTTTTTAATCGACGTGGATAAAGGCGAAAACTACTGTTTCAGC
GTGCAAGCTGTGATCCCCTCCCGGACCGTGAATAGGAAAAGCACCGATAGC
CCCGTTGAGTGCATGGGCCAAGAAAAGGGCGAGTTCCGGGAGAACTGGGTG
AACGTCATCAGCGATTTAAAGAAGATCGAAGATTTAATTCAGTCCATGCAT
ATCGACGCCACTTTATACACAGAATCCGACGTGCACCCCTCTTGTAAGGTG
ACCGCCATGAAATGTTTTTTACTGGAGCTGCAAGTTATCTCTTTAGAGAGC
GGAGACGCTAGCATCCACGACACCGTGGAGAATTTAATCATTTTAGCCAAT
AACTCTTTATCCAGCAACGGCAACGTGACAGAGTCCGGCTGCAAGGAGTGC
GAAGAGCTGGAGGAGAAGAACATCAAGGAGTTTCTGCAATCCTTTGTGCAC
ATTGTCCAGATGTTCATCAATACCTCC.

[0815] In some embodiments, the first chimeric polypeptide can include a sequence that is at least 80% identical (e.g., at least 82% identical, at least 84% identical, at least 86% identical, at least 88% identical, at least 90% identical, at least 92% identical, at least 94% identical, at least 96% identical, at least 98% identical, at least 99% identical, or 100% identical) to:

(SEQ ID NO: 209)
MKWVTFISLLFLFSSAYSDCDIEGKDGKQYESVLMVSIDQLLDSMKEIGSN
CLNNEFNFFKRHICDANKEGMFLFRAARKLRQFLKMNSTGDFDLHLLKVSE
GTTILLNCTGQVKGRKPAALGEAQPTKSLEENKSLKEQKKLNDLCFLKRLL
QEIKTCWNKILMGTKEHSGTTNTVAAYNLTWKSTNFKTILEWEPKPVNQVY
TVQISTKSGDWKSKCFYTTDTECDLTDEIVKDVKQTYLARVFSYPAGNVES
TGSAGEPLYENSPEFTPYLETNLGQPTIQSFEQVGTKVNVTVEDERTLVRR
NNTFLSLRDVFGKDLIYTLYYWKSSSSGKKTAKTNTNEFLIDVDKGENYCF
SVQAVIPSRTVNRKSTDSPVECMGQEKGEFRENWVNVISDLKKIEDLIQSM
HIDATLYTESDVHPSCKVTAMKCFLLELQVISLESGDASIHDTVENLIILA
NNSLSSNGNVTESGCKECEELEEKNIKEFLQSFVHIVQMFINTS.

[0816] In some embodiments, a first chimeric polypeptide is encoded by a sequence that is at least 80% identical (e.g., at least 82% identical, at least 84% identical, at least 86% identical, at least 88% identical, at least 90% identical, at least 92% identical, at least 94% identical, at least 96% identical, at least 98% identical, at least 99% identical, or 100% identical) to:

(SEQ ID NO: 210)
ATGAAGTGGGTGACCTTCATCAGCCTGCTGTTCCTGTTCTCCAGCGCCTAC
TCCGATTGCGACATCGAGGGCAAGGACGGCAAGCAGTACGAGAGCGTGCTG
ATGGTGTCCATCGACCAGCTGCTGGACAGCATGAAGGAGATCGGCTCCAAC
TGCCTCAACAACGAGTTCAACTTCTTCAAGCGGCACATCTGCGACGCCAAC
AAGGAGGGCATGTTCCTGTTCAGGGCCGCCAGGAAACTGCGGCAGTTCCTG
AAGATGAACTCCACCGGCGACTTCGACCTGCACCTGCTGAAGGTGTCCGAG
GGCACCACCATCCTGCTGAACTGCACCGGACAGGTGAAGGGCCGGAAACCT
GCTGCTCTGGGAGAGGCCCAACCCACCAAGAGCCTGGAGGAGAACAAGTCC
CTGAAGGAGCAGAAGAAGCTGAACGACCTGTGCTTCCTGAAGAGGCTGCTG
CAGGAGATCAAGACCTGCTGGAACAAGATCCTGATGGGCACCAAGGAGCAT
AGCGGCACAACCAACACAGTCGCTGCCTATAACCTCACTTGGAAGAGCACC
AACTTCAAAACCATCCTCGAATGGGAACCCAAACCCGTTAACCAAGTTTAC
ACCGTGCAGATCAGCACCAAGTCCGGCGACTGGAAGTCCAAATGTTTCTAT
ACCACCGACACCGAGTGCGATCTCACCGATGAGATCGTGAAAGATGTGAAA
CAGACCTACCTCGCCCGGGTGTTTAGCTACCCCGCCGGCAATGTGGAGAGC
ACTGGTTCCGCTGGCGAGCCTTTATACGAGAACAGCCCCGAATTTACCCCT
TACCTCGAGACCAATTTAGGACAGCCCACCATCCAAAGCTTTGAGCAAGTT
GGCACAAAGGTGAATGTGACAGTGGAGGACGAGCGGACTTTAGTGCGGCGG
AACAACACCTTTCTCAGCCTCCGGGATGTGTTCGGCAAAGATTTAATCTAC
ACACTGTATTACTGGAAGTCCTCTTCCTCCGGCAAGAAGACAGCTAAAACC
AACACAAACGAGTTTTTAATCGACGTGGATAAAGGCGAAAACTACTGTTTC
AGCGTGCAAGCTGTGATCCCCTCCCGGACCGTGAATAGGAAAAGCACCGAT
AGCCCCGTTGAGTGCATGGGCCAAGAAAAGGGCGAGTTCCGGGAGAACTGG
GTGAACGTCATCAGCGATTTAAAGAAGATCGAAGATTTAATTCAGTCCATG
CATATCGACGCCACTTTATACACAGAATCCGACGTGCACCCCTCTTGTAAG
GTGACCGCCATGAAATGTTTTTTACTGGAGCTGCAAGTTATCTCTTTAGAG
AGCGGAGACGCTAGCATCCACGACACCGTGGAGAATTTAATCATTTTAGCC
AATAACTCTTTATCCAGCAACGGCAACGTGACAGAGTCCGGCTGCAAGGAG
TGCGAAGAGCTGGAGGAGAAGAACATCAAGGAGTTTCTGCAATCCTTTGTG
CACATTGTCCAGATGTTCATCAATACCTCC.

[0817] In some embodiments, the second chimeric polypeptide can include a sequence that is at least 80% identical (e.g., at least 82% identical, at least 84% identical, at least 86% identical, at least 88% identical, at least 90% identical, at least 92% identical, at least 94% identical, at least 96% identical, at least 98% identical, at least 99% identical, or 100% identical) to:

(SEQ ID NO: 268)
QGQDRHMIRMRQLIDIVDQLKNYVNDLVPEFLPAPEDVETNCEWSAFSCFQ
KAQLKSANTGNNERIINVSIKKLKRKPPSTNAGRRQKHRLTPSCDSYEKKP
PKEFLERFKSLLQKMIHQHLSSRTHGSEDSITCPPPMSVEHADIWVKSYSL
YSRERYICNSGFKRKAGTSSLTECVLNKATNVAHWTTPSLKCIRGGGGSGG
GGSGGGGSREGPELSPDDPAGLLDLRQGMFAQLVAQNVLLIDGPLSWYSDP
GLAGVSLTGGLSYKEDTKELVVAKAGVYYVFFQLELRRVVAGEGSGSVSLA
LHLQPLRSAAGAAALALTVDLPPASSEARNSAFGFQGRLLHLSAGQRLGVH
LHTEARARHAWQLTQGATVLGLFRVTPEIPAGLPSPRSE.

[0818] In some embodiments, a second chimeric polypeptide is encoded by a sequence that is at least 80% identical (e.g., at least 82% identical, at least 84% identical, at least 86% identical, at least 88% identical, at least 90% identical, at least 92% identical, at least 94% identical, at least 96% identical, at least 98% identical, at least 99% identical, or 100% identical) to:

(SEQ ID NO: 269)
CAGGGCCAGGACAGGCACATGATCCGGATGAGGCAGCTCATCGACATCGTC
GACCAGCTGAAGAACTACGTGAACGACCTGGTGCCCGAGTTTCTGCCTGCC
CCCGAGGACGTGGAGACCAACTGCGAGTGGTCCGCCTTCTCCTGCTTTCAG
AAGGCCCAGCTGAAGTCCGCCAACACCGGCAACAACGAGCGGATCATCAAC
GTGAGCATCAAGAAGCTGAAGCGGAAGCCTCCCTCCACAAACGCCGGCAGG
AGGCAGAAGCACAGGCTGACCTGCCCCAGCTGTGACTCCTACGAGAAGAAG
CCCCCCAAGGAGTTCCTGGAGAGGTTCAAGTCCCTGCTGCAGAAGATGATC
CATCAGCACCTGTCCTCCAGGACCCACGGCTCCGAGGACTCCATTACATGC
CCCCCTCCCATGAGCGTGGAGCACGCCGACATCTGGGTGAAGAGCTATAGC
CTCTACAGCCGGGAGAGGTATATCTGTAACAGCGGCTTCAAGAGGAAGGCC
GGCACCAGCAGCCTCACCGAGTGCGTGCTGAATAAGGCTACCAACGTGGCT
CACTGGACAACACCCTCTTTAAAGTGCATCCGGGGCGGTGGAGGATCCGGA
GGAGGTGGCTCCGGCGGCGGAGGATCTCGCGAGGGTCCCGAGCTTTCGCCC
GACGATCCCGCCGGCCTCTTGGACCTGCGGCAGGGCATGTTTGCGCAGCTG
GTGGCCCAAAATGTTCTGCTGATCGATGGGCCCCTGAGCTGGTACAGTGAC
CCAGGCCTGGCAGGCGTGTCCCTGACGGGGGGCCTGAGCTACAAAGAGGAC
ACGAAGGAGCTGGTGGTGGCCAAGGCTGGAGTCTACTATGTCTTCTTTCAA
CTAGAGCTGCGGCGCGTGGTGGCCGGCGAGGGCTCAGGCTCCGTTTCACTT
GCGCTGCACCTGCAGCCACTGCGCTCTGCTGCTGGGGCCGCCGCCCTGGCT
TTGACCGTGGACCTGCCACCCGCCTCCTCCGAGGCTCGGAACTCGGCCTTC
GGTTTCCAGGGCCGCTTGCTGCACCTGAGTGCCGGCCAGCGCCTGGGCGTC
CATCTTCACACTGAGGCCAGGGCACGCCATGCCTGGCAGCTTACCCAGGGC
GCCACAGTCTTGGGACTCTTCCGGGTGACCCCCGAAATCCCAGCCGGACTC
CCTTCACCGAGGTCGGAA.

[0819] In some embodiments, the second chimeric polypeptide can include a sequence that is at least 80% identical (e.g., at least 82% identical, at least 84% identical, at least 86% identical, at least 88% identical, at least 90% identical, at least 92% identical, at least 94% identical, at least 96% identical, at least 98% identical, at least 99% identical, or 100% identical) to:

(SEQ ID NO: 270)
MKWVTFISLLFLFSSAYSQGQDRHMIRMRQLIDIVDQLKNYVNDLVPEFLP
APEDVETNCEWSAFSCFQKAQLKSANTGNNERIINVSIKKLKRKPPSTNAG
RRQKHRLTCPSCDSYEKKPPKEFLERFKSLLQKMIHQHLSSRTHGSEDSIT
CPPPMSVEHADIWVKSYSLYSRERYICNSGFKRKAGTSSLTECVLNKATNV
AHWTTPSLKCIRGGGGSGGGGSGGGGSREGPELSPDDPAGLLDLRQGMFAQ
LVAQNVLLIDGPLSWYSDPGLAGVSLTGGLSYKEDTKELVVAKAGVYYVFF
QLELRRVVAGEGSGSVSLALHLQPLRSAAGAAALALTVDLPPASSEARNSA
FGFQGRLLHLSAGQRLGVHLHTEARARHAWQLTQGATVLGLFRVTPEIPAG
LPSPRSE.

[0820] In some embodiments, a second chimeric polypeptide is encoded by a sequence that is at least 80% identical (e.g., at least 82% identical, at least 84% identical, at least 86% identical, at least 88% identical, at least 90% identical, at least 92% identical, at least 94% identical, at least 96% identical, at least 98% identical, at least 99% identical, or 100% identical) to:

(SEQ ID NO: 271)
ATGAAGTGGGTGACCTTCATCAGCCTGCTGTTCCTGTTCTCCAGCGCCTAC
TCCCAGGGCCAGGACAGGCACATGATCCGGATGAGGCAGCTCATCGACATC
GTCGACCAGCTGAAGAACTACGTGAACGACCTGGTGCCCGAGTTTCTGCCT
GCCCCCGAGGACGTGGAGACCAACTGCGAGTGGTCCGCCTTCTCCTGCTTT
CAGAAGGCCCAGCTGAAGTCCGCCAACACCGGCAACAACGAGCGGATCATC
AACGTGAGCATCAAGAAGCTGAAGCGGAAGCCTCCCTCCACAAACGCCGGC
AGGAGGCAGAAGCACAGGCTGACCTGCCCCAGCTGTGACTCCTACGAGAAG
AAGCCCCCCAAGGAGTTCCTGGAGAGGTTCAAGTCCCTGCTGCAGAAGATG
ATCCATCAGCACCTGTCCTCCAGGACCCACGGCTCCGAGGACTCCATTACA
TGCCCCCCTCCCATGAGCGTGGAGCACGCCGACATCTGGGTGAAGAGCTAT
AGCCTCTACAGCCGGGAGAGGTATATCTGTAACAGCGGCTTCAAGAGGAAG
GCCGGCACCAGCAGCCTCACCGAGTGCGTGCTGAATAAGGCTACCAACGTG
GCTCACTGGACAACACCCTCTTTAAAGTGCATCCGGGGCGGTGGAGGATCC
GGAGGAGGTGGCTCCGGCGGCGGAGGATCTCGCGAGGGTCCCGAGCTTTCG
CCCGACGATCCCGCCGGCCTCTTGGACCTGCGGCAGGGCATGTTTGCGCAG
CTGGTGGCCCAAAATGTTCTGCTGATCGATGGGCCCCTGAGCTGGTACAGT
GACCCAGGCCTGGCAGGCGTGTCCCTGACGGGGGGCCTGAGCTACAAAGAG
GACACGAAGGAGCTGGTGGTGGCCAAGGCTGGAGTCTACTATGTCTTCTTT
CAACTAGAGCTGCGGCGCGTGGTGGCCGGCGAGGGCTCAGGCTCCGTTTCA
CTTGCGCTGCACCTGCAGCCACTGCGCTCTGCTGCTGGGGCCGCCGCCCTG
GCTTTGACCGTGGACCTGCCACCCGCCTCCTCCGAGGCTCGGAACTCGGCC
TTCGGTTTCCAGGGCCGCTTGCTGCACCTGAGTGCCGGCCAGCGCCTGGGC
GTCCATCTTCACACTGAGGCCAGGGCACGCCATGCCTGGCAGCTTACCCAG
GGCGCCACAGTCTTGGGACTCTTCCGGGTGACCCCCGAAATCCCAGCCGGA
CTCCCTTCACCGAGGTCGGAA.

[0821] In some embodiments, the second chimeric polypeptide can include a sequence that is at least 80% identical (e.g., at least 82% identical, at least 84% identical, at least 86% identical, at least 88% identical, at least 90% identical, at least 92% identical, at least 94% identical, at least 96% identical, at least 98% identical, at least 99% identical, or 100% identical) to:

(SEQ ID NO: 272)
QGQDRHMIRMRQLIDIVDQLKNYVNDLVPEFLPAPEDVETNCEWSAFSCFQ
KAQLKSANTGNNERIINVSIKKLKRKPPSTNAGRRQKHRLTCPSCDSYEKK
PPKEFLERFKSLLQKMIHQHLSSRTHGSEDSITCPPPMSVEHADIWVKSYS
LYSRERYICNSGFKRKAGTSSLTECVLNKATNVAHWTTPSLKCIRGGGGSG
GGGSGGGGSDPAGLLDLRQGMFAQLVAQNVLLIDGPLSWYSDPGLAGVSLT
GGLSYKEDTKELVVAKAGVYYVFFQLELRRVVAGEGSGSVSLALHLQPLRS
AAGAAALALTVDLPPASSEARNSAFGFQGRLLHLSAGQRLGVHLHTEARAR
HAWQLTQGATVLGLFRVTPEI.

[0822] In some embodiments, a second chimeric polypeptide is encoded by a sequence that is at least 80% identical (e.g., at least 82% identical, at least 84% identical, at least 86% identical, at least 88% identical, at least 90% identical, at least 92% identical, at least 94% identical, at least 96% identical, at least 98% identical, at least 99% identical, or 100% identical) to:

(SEQ ID NO: 273)
CAGGGCCAGGACAGGCACATGATCCGGATGAGGCAGCTCATCGACATCGTC
GACCAGCTGAAGAACTACGTGAACGACCTGGTGCCCGAGTTTCTGCCTGCC
CCCGAGGACGTGGAGACCAACTGCGAGTGGTCCGCCTTCTCCTGCTTTCAG
AAGGCCCAGCTGAAGTCCGCCAACACCGGCAACAACGAGCGGATCATCAAC
GTGAGCATCAAGAAGCTGAAGCGGAAGCCTCCCTCCACAAACGCCGGCAGG
AGGCAGAAGCACAGGCTGACCTGCCCCAGCTGTGACTCCTACGAGAAGAAG
CCCCCCAAGGAGTTCCTGGAGAGGTTCAAGTCCCTGCTGCAGAAGATGATC
CATCAGCACCTGTCCTCCAGGACCCACGGCTCCGAGGACTCCATTACATGC
CCCCCTCCCATGAGCGTGGAGCACGCCGACATCTGGGTGAAGAGCTATAGC
CTCTACAGCCGGGAGAGGTATATCTGTAACAGCGGCTTCAAGAGGAAGGCC
GGCACCAGCAGCCTCACCGAGTGCGTGCTGAATAAGGCTACCAACGTGGCT
CACTGGACAACACCCTCTTTAAAGTGCATCCGGGGCGGTGGAGGATCCGGA
GGAGGTGGCTCCGGCGGCGGAGGATCTGATCCCGCCGGCCTCTTGGACCTG
CGGCAGGGCATGTTTGCGCAGCTGGTGGCCCAAAATGTTCTGCTGATCGAT
GGGCCCCTGAGCTGGTACAGTGACCCAGGCCTGGCAGGCGTGTCCCTGACG
GGGGGCCTGAGCTACAAAGAGGACACGAAGGAGCTGGTGGTGGCCAAGGCT
GGAGTCTACTATGTCTTCTTTCAACTAGAGCTGCGGCGCGTGGTGGCCGGC
GAGGGCTCAGGCTCCGTTTCACTTGCGCTGCACCTGCAGCCACTGCGCTCT
GCTGCTGGGGCCGCCGCCCTGGCTTTGACCGTGGACCTGCCACCCGCCTCC
TCCGAGGCTCGGAACTCGGCCTTCGGTTTCCAGGGCCGCTTGCTGCACCTG
AGTGCCGGCCAGCGCCTGGGCGTCCATCTTCACACTGAGGCCAGGGCACGC
CATGCCTGGCAGCTTACCCAGGGCGCCACAGTCTTGGGACTCTTCCGGGTG
ACCCCCGAAATC.

[0823] In some embodiments, the second chimeric polypeptide can include a sequence that is at least 80% identical (e.g., at least 82% identical, at least 84% identical, at least 86% identical, at least 88% identical, at least 90% identical, at least 92% identical, at least 94% identical, at least 96% identical, at least 98% identical, at least 99% identical, or 100% identical) to:

(SEQ ID NO: 274)
MKWVTFISLLFLFSSAYSQGQDRHMIRMRQLIDIVDQLKNYVNDLVPEFLP
APEDVETNCEWSAFSCFQKAQLKSANTGNNERIINVSIKKLKRKPPSTNAG
RRQKHRLTCPSCDSYEKKPPKEFLERFKSLLQKMIHQHLSSRTHGSEDSIT
CPPPMSVEHADIWVKSYSLYSRERYICNSGFKRKAGTSSLTECVLNKATNV
AHWTTPSLKCIRGGGGSGGGGSGGGGSDPAGLLDLRQGMFAQLVAQNVLLI
DGPLSWYSDPGLAGVSLTGGLSYKEDTKELVVAKAGVYYVFFQLELRRVVA
GEGSGSVSLALHLQPLRSAAGAAALALTVDLPPASSEARNSAFGFQGRLLH
LSAGQRLGVHLHTEARARHAWQLTQGATVLGLFRVTPEI.

[0824] In some embodiments, a second chimeric polypeptide is encoded by a sequence that is at least 80% identical (e.g., at least 82% identical, at least 84% identical, at least 86% identical, at least 88% identical, at least 90% identical, at least 92% identical, at least 94% identical, at least 96% identical, at least 98% identical, at least 99% identical, or 100% identical) to:

(SEQ ID NO: 275)
ATGAAGTGGGTGACCTTCATCAGCCTGCTGTTCCTGTTCTCCAGCGCCTAC
TCCCAGGGCCAGGACAGGCACATGATCCGGATGAGGCAGCTCATCGACATC
GTCGACCAGCTGAAGAACTACGTGAACGACCTGGTGCCCGAGTTTCTGCCT
GCCCCCGAGGACGTGGAGACCAACTGCGAGTGGTCCGCCTTCTCCTGCTTT
CAGAAGGCCCAGCTGAAGTCCGCCAACACCGGCAACAACGAGCGGATCATC
AACGTGAGCATCAAGAAGCTGAAGCGGAAGCCTCCCTCCACAAACGCCGGC
AGGAGGCAGAAGCACAGGCTGACCTGCCCCAGCTGTGACTCCTACGAGAAG
AAGCCCCCCAAGGAGTTCCTGGAGAGGTTCAAGTCCCTGCTGCAGAAGATG
ATCCATCAGCACCTGTCCTCCAGGACCCACGGCTCCGAGGACTCCATTACA
TGCCCCCCTCCCATGAGCGTGGAGCACGCCGACATCTGGGTGAAGAGCTAT
AGCCTCTACAGCCGGGAGAGGTATATCTGTAACAGCGGCTTCAAGAGGAAG
GCCGGCACCAGCAGCCTCACCGAGTGCGTGCTGAATAAGGCTACCAACGTG
GCTCACTGGACAACACCCTCTTTAAAGTGCATCCGGGGCGGTGGAGGATCC
GGAGGAGGTGGCTCCGGCGGCGGAGGATCTGATCCCGCCGGCCTCTTGGAC
CTGCGGCAGGGCATGTTTGCGCAGCTGGTGGCCCAAAATGTTCTGCTGATC
GATGGGCCCCTGAGCTGGTACAGTGACCCAGGCCTGGCAGGCGTGTCCCTG
ACGGGGGGCCTGAGCTACAAAGAGGACACGAAGGAGCTGGTGGTGGCCAAG
GCTGGAGTCTACTATGTCTTCTTTCAACTAGAGCTGCGGCGCGTGGTGGCC
GGCGAGGGCTCAGGCTCCGTTTCACTTGCGCTGCACCTGCAGCCACTGCGC
TCTGCTGCTGGGGCCGCCGCCCTGGCTTTGACCGTGGACCTGCCACCCGCC
TCCTCCGAGGCTCGGAACTCGGCCTTCGGTTTCCAGGGCCGCTTGCTGCAC
CTGAGTGCCGGCCAGCGCCTGGGCGTCCATCTTCACACTGAGGCCAGGGCA
CGCCATGCCTGGCAGCTTACCCAGGGCGCCACAGTCTTGGGACTCTTCCGG
GTGACCCCCGAAATC.

### Exemplary Multi-Chain Chimeric Polypeptides—Type K

[0825] In some embodiments of any of the multi-chain chimeric polypeptides described herein, the first target-binding domain and the second targeting-binding domain each independently bind specifically to a receptor of IL-7 or TGF-β. In some examples of these multi-chain chimeric polypeptides, the first target-binding domain and the soluble tissue factor domain directly abut each other in the first chimeric polypeptide. In some examples of these multi-chain chimeric polypeptides, the first chimeric polypeptide further comprises a linker sequence (e.g., any of the exemplary linkers described herein) between the first target-binding domain and the soluble tissue factor domain in the first chimeric polypeptide.

[0826] In some embodiments of these multi-chain chimeric polypeptides, the soluble tissue factor domain and the first domain of the pair of affinity domains directly abut each other in the first chimeric polypeptide. In some embodiments of these multi-chain chimeric polypeptides, the first chimeric polypeptide further includes a linker sequence (e.g., any of the exemplary linkers described herein) between the soluble tissue factor domain and the first domain of the pair of affinity domains in the first chimeric polypeptide.

[0827] In some embodiments of these multi-chain chimeric polypeptides, the second domain of the pair of affinity domains and the second target-binding domain directly abut each other in the second chimeric polypeptide. In some embodiments of these multi-chain chimeric polypeptides, the second chimeric polypeptide further includes a linker sequence (e.g., any of the exemplary linkers described herein) between the second domain of the pair of affinity domains and the second target-binding domain in the second chimeric polypeptide.

[0828] In some embodiments of these multi-chain chimeric polypeptides, the soluble tissue factor domain can be any of the exemplary soluble tissue factor domains described herein. In some embodiments of these multi-chain chimeric polypeptides, the pair of affinity domains can be any of the exemplary pairs of affinity domains described herein.

[0829] In some embodiments of these multi-chain chimeric polypeptides, the first target-binding domain binds specifically to a receptor for IL-7, and the second target-binding domain binds specifically to TGF-β. In some embodiments of these multi-chain chimeric polypeptides, the first target-binding domain binds specifically to TGF-β, and the second target-binding domain binds specifically to a receptor for IL-7.

[0830] In some embodiments of these multi-chain chimeric polypeptides, the first target-binding domain includes a soluble IL-7 protein (e.g., a soluble human IL-7 protein). In some embodiments of these multi-chain chimeric polypeptides, the soluble human IL-7 protein includes a sequence that is at least 80% identical (e.g., at least 82% identical, at least 84% identical, at least 86% identical, at least 88% identical, at least 90% identical, at least 92% identical, at least 94% identical, at least 96% identical, at least 98% identical, at least 99% identical, or 100% identical) to:

(SEQ ID NO: 79)
DCDIEGKDGKQYESVLMVSIDQLLDSMKEIGSNCLNNEFNEFKRHICDANK
EGMFLFRAARKLRQFLKMNSTGDFDLHLLKVSEGTTILLNCTGQVKGRKPA
ALGEAQPTKSLEENKSLKEQKKLNDLCFLKRLLQEIKTCWNKILMGTKEH.

[0831] In some embodiments of these multi-chain chimeric polypeptides, the soluble human IL-7 is encoded by a sequence that is at least 80% identical (e.g., at least 82% identical, at least 84% identical, at least 86% identical, at least 88% identical, at least 90% identical, at least 92% identical, at least 94% identical, at least 96% identical, at least 98% identical, at least 99% identical, or 100% identical) to:

(SEQ ID NO: 227)
GATTGCGACATCGAGGGCAAGGACGGCAAGCAGTACGAGAGCGTGCTGATG
GTGTCCATCGACCAGCTGCTGGACAGCATGAAGGAGATCGGCTCCAACTGC
CTCAACAACGAGTTCAACTTCTTCAAGCGGCACATCTGCGACGCCAACAAG
GAGGGCATGTTCCTGTTCAGGGCCGCCAGGAAACTGCGGCAGTTCCTGAAG
ATGAACTCCACCGGCGACTTCGACCTGCACCTGCTGAAGGTGTCCGAGGGC
ACCACCATCCTGCTGAACTGCACCGGACAGGTGAAGGGCCGGAAACCTGCT
GCTCTGGGAGAGGCCCAACCCACCAAGAGCCTGGAGGAGAACAAGTCCCTG
AAGGAGCAGAAGAAGCTGAACGACCTGTGCTTCCTGAAGAGGCTGCTGCAG
GAGATCAAGACCTGCTGGAACAAGATCCTGATGGGCACCAAGGAGCAT.

[0832] In some embodiments of these multi-chain chimeric polypeptides, the second target-binding domain comprises a target-binding domain that binds specifically to TGF-β. In some embodiments of these multi-chain chimeric polypeptides, the second target-binding domain is a soluble TGF-β receptor (e.g., a soluble TGFβRII receptor, e.g., a soluble human TGFβRII receptor). In some embodiments of these multi-chain chimeric polypeptides, the soluble human TGFRβRII includes a first sequence of soluble human TGFRβRII and a second sequence of soluble human TGFRβRII. In some embodiments of these multi-chain chimeric polypeptides, the soluble human TGFRβRII includes a linker disposed between the first sequence of soluble human TGFRβRII and the second sequence of soluble human TGFRβRII. In some examples of these multi-chain chimeric polypeptides, the linker includes the sequence GGGGSGGGGSGGGGS (SEQ ID NO: 102).

[0833] In some embodiments of these multi-chain chimeric polypeptides, the first sequence of soluble human TGFRβRII receptor comprises a sequence that is at least 80% identical (e.g., at least 82% identical, at least 84% identical, at least 86% identical, at least 88% identical, at least 90% identical, at least 92% identical, at least 94% identical, at least 96% identical, at least 98% identical, at least 99% identical, or 100% identical) to:

(SEQ ID NO: 183)
IPPHVQKSVNNDMIVTDNNGAVKFPQLCKFCDVRFSTCDNQKSCMSNCSIT
SICEKPQEVCVAVWRKNDENITLETVCHDPKLPYHDFILEDAASPKCIMKE
KKKPGETFFMCSCSSDECNDNIIFSEEYNTSNPD.

[0834] In some embodiments of these multi-chain chimeric polypeptides, the second sequence of soluble human TGFRβRII receptor comprises a sequence that is at least 80% identical (e.g., at least 82% identical, at least 84% identical, at least 86% identical, at least 88% identical, at least 90% identical, at least 92% identical, at least 94% identical, at least 96% identical, at least 98% identical, at least 99% identical, or 100% identical) to:

(SEQ ID NO: 184)
IPPHVQKSVNNDMIVTDNNGAVKFPQLCKFCDVRFSTCDNQKSCMSNCSIT
SICEKPQEVCVAVWRKNDENITLETVCHDPKLPYHDFILEDAASPKCIMKE
KKKPGETFFMCSCSSDECNDNIIFSEEYNTSNPD.

[0835] In some embodiments of these multi-chain chimeric polypeptides, the first sequence of soluble human TGFRβRII receptor is encoded by a sequence that is at least 80% identical (e.g., at least 82% identical, at least 84% identical, at least 86% identical, at least 88% identical, at least 90% identical, at least 92% identical, at least 94% identical, at least 96% identical, at least 98% identical, at least 99% identical, or 100% identical) to:

(SEQ ID NO: 185)
ATCCCCCCCCATGTGCAAAAGAGCGTGAACAACGATATGATCGTGACCGA
CAACAACGGCGCCGTGAAGTTTCCCCAGCTCTGCAAGTTCTGCGATGTCA
GGTTCAGCACCTGCGATAATCAGAAGTCCTGCATGTCCAACTGCAGCATC
ACCTCCATCTGCGAGAAGCCCCAAGAAGTGTGCGTGGCCGTGTGGCGGAA
AAATGACGAGAACATCACCCTGGAGACCGTGTGTCACGACCCCAAGCTCC
CTTATCACGACTTCATTCTGGAGGACGCTGCCTCCCCCAAATGCATCATG
AAGGAGAAGAAGAAGCCCGGAGAGACCTTCTTTATGTGTTCCTGTAGCAG
CGACGAGTGTAACGACAACATCATCTTCAGCGAAGAGTACAACACCAGCA
ACCCTGAT.

[0836] In some embodiments of these multi-chain chimeric polypeptides, the second sequence of soluble human TGFRβRII receptor is encoded by a sequence that is at least 80% identical (e.g., at least 82% identical, at least 84% identical, at least 86% identical, at least 88% identical, at least 90% identical, at least 92% identical, at least 94% identical, at least 96% identical, at least 98% identical, at least 99% identical, or 100% identical) to:

(SEQ ID NO: 186)
ATTCCTCCCCACGTGCAGAAGAGCGTGAATAATGACATGATCGTGACCGA
TAACAATGGCGCCGTGAAATTTCCCCAGCTGTGCAAATTCTGCGATGTGA
GGTTTTCCACCTGCGACAACCAGAAGTCCTGTATGAGCAACTGCTCCATC
ACCTCCATCTGTGAGAAGCCTCAGGAGGTGTGCGTGGCTGTCTGGCGGAA
GAATGACGAGAATATCACCCTGGAAACCGTCTGCCACGATCCCAAGCTGC
CCTACCACGATTTCATCCTGGAAGACGCCGCCAGCCCTAAGTGCATCATG
AAAGAGAAAAAGAAGCCTGGCGAGACCTTTTTCATGTGCTCCTGCAGCAG
CGACGAATGCAACGACAATATCATCTTTAGCGAGGAATACAATACCAGCA
ACCCCGAC.

[0837] In some embodiments of these multi-chain chimeric polypeptides, the soluble TGF-β receptor includes a sequence that is at least 80% identical (e.g., at least 82% identical, at least 84% identical, at least 86% identical, at least 88% identical, at least 90% identical, at least 92% identical, at least 94% identical, at least 96% identical, at least 98% identical, at least 99% identical, or 100% identical) to:

(SEQ ID NO: 188)
IPPHVQKSVNNDMIVTDNNGAVKFPQLCKFCDVRFSTCDNQKSCMSNCSIT
SICEKPQEVCVAVWRKNDENITLETVCHDPKLPYHDFILEDAASPKCIMKE
KKKPGETFFMCSCSSDECNDNIIFSEEYNTSNPDGGGGSGGGGSGGGGSIP
PHVQKSVNND1VIVTDNNGAVKFPQLCKFCDVRFSTCDNQKSCMSNCSITS
ICEKPQEVCVAVWRKNDENITLETVCHDPKLPYHDFILEDAASPKCIMKEK
KKPGETFFMCSCSSDECNDNIIFSEEYNTSNPD.

[0838] In some embodiments of these multi-chain chimeric polypeptides, the soluble TGF-β receptor is encoded by a sequence that is at least 80% identical (e.g., at least 82% identical, at least 84% identical, at least 86% identical, at least 88% identical, at least 90% identical, at least 92% identical, at least 94% identical, at least 96% identical, at least 98% identical, at least 99% identical, or 100% identical) to:

(SEQ ID NO: 187)
ATCCCCCCCCATGTGCAAAAGAGCGTGAACAACGATATGATCGTGACCGAC
AACAACGGCGCCGTGAAGTTTCCCCAGCTCTGCAAGTTCTGCGATGTCAGG
TTCAGCACCTGCGATAATCAGAAGTCCTGCATGTCCAACTGCAGCATCACC
TCCATCTGCGAGAAGCCCCAAGAAGTGTGCGTGGCCGTGTGGCGGAAAAAT
GACGAGAACATCACCCTGGAGACCGTGTGTCACGACCCCAAGCTCCCTTAT
CACGACTTCATTCTGGAGGACGCTGCCTCCCCCAAATGCATCATGAAGGAG
AAGAAGAAGCCCGGAGAGACCTTCTTTATGTGTTCCTGTAGCAGCGACGAG
TGTAACGACAACATCATCTTCAGCGAAGAGTACAACACCAGCAACCCTGAT
GGAGGTGGCGGATCCGGAGGTGGAGGTTCTGGTGGAGGTGGGAGTATTCCT
CCCCACGTGCAGAAGAGCGTGAATAATGACATGATCGTGACCGATAACAAT
GGCGCCGTGAAATTTCCCCAGCTGTGCAAATTCTGCGATGTGAGGTTTTCC
ACCTGCGACAACCAGAAGTCCTGTATGAGCAACTGCTCCATCACCTCCATC
TGTGAGAAGCCTCAGGAGGTGTGCGTGGCTGTCTGGCGGAAGAATGACGAG
AATATCACCCTGGAAACCGTCTGCCACGATCCCAAGCTGCCCTACCACGAT
TTCATCCTGGAAGACGCCGCCAGCCCTAAGTGCATCATGAAAGAGAAAAAG
AAGCCTGGCGAGACCTTTTTCATGTGCTCCTGCAGCAGCGACGAATGCAAC
GACAATATCATCTTTAGCGAGGAATACAATACCAGCAACCCCGAC.

[0839] In some embodiments, the first chimeric polypeptide can include a sequence that is at least 80% identical (e.g., at least 82% identical, at least 84% identical, at least 86% identical, at least 88% identical, at least 90% identical, at least 92% identical, at least 94% identical, at least 96% identical, at least 98% identical, at least 99% identical, or 100% identical) to:

(SEQ ID NO: 207)
DCDIEGKDGKQYESVLMVSIDQLLDSMKEIGSNCLNNEFNEFKRHICDANK
EGMFLFRAARKLRQFLKMNSTGDFDLHLLKVSEGTTILLNCTGQVKGRKPA
ALGEAQPTKSLEENKSLKEQKKLNDLCFLKRLLQEIKTCWNKILMGTKEHS
GTTNTVAAYNLTWKSTNEKTILEWEPKPVNQVYTVQISTKSGDWKSKCEYT
TDTECDLTDEIVKDVKQTYLARVFSYPAGNVESTGSAGEPLYENSPEFTPY
LETNLGQPTIQSFEQVGTKVNVTVEDERTLVRRNNTFLSLRDVFGKDLIYT
LYYWKSSSSGKKTAKTNTNEFLIDVDKGENYCFSVQAVIPSRTVNRKSTDS
PVECMGQEKGEFRENWVNVISDLKKIEDLIQSMHIDATLYTESDVHPSCKV
TAMKCFLLELQVISLESGDASIHDTVENLIILANNSLSSNGNVTESGCKEC
EELEEKNIKEFLQSFVHIVQMFINTS.

[0840] In some embodiments, a first chimeric polypeptide is encoded by a sequence that is at least 80% identical (e.g., at least 82% identical, at least 84% identical, at least 86% identical, at least 88% identical, at least 90% identical, at least 92% identical, at least 94% identical, at least 96% identical, at least 98% identical, at least 99% identical, or 100% identical) to:

(SEQ ID NO: 208)
GATTGCGACATCGAGGGCAAGGACGGCAAGCAGTACGAGAGCGTGCTGATG
GTGTCCATCGACCAGCTGCTGGACAGCATGAAGGAGATCGGCTCCAACTGC
CTCAACAACGAGTTCAACTTCTTCAAGCGGCACATCTGCGACGCCAACAAG
GAGGGCATGTTCCTGTTCAGGGCCGCCAGGAAACTGCGGCAGTTCCTGAAG
ATGAACTCCACCGGCGACTTCGACCTGCACCTGCTGAAGGTGTCCGAGGGC
ACCACCATCCTGCTGAACTGCACCGGACAGGTGAAGGGCCGGAAACCTGCT
GCTCTGGGAGAGGCCCAACCCACCAAGAGCCTGGAGGAGAACAAGTCCCTG
AAGGAGCAGAAGAAGCTGAACGACCTGTGCTTCCTGAAGAGGCTGCTGCAG
GAGATCAAGACCTGCTGGAACAAGATCCTGATGGGCACCAAGGAGCATAGC
GGCACAACCAACACAGTCGCTGCCTATAACCTCACTTGGAAGAGCACCAAC
TTCAAAACCATCCTCGAATGGGAACCCAAACCCGTTAACCAAGTTTACACC
GTGCAGATCAGCACCAAGTCCGGCGACTGGAAGTCCAAATGTTTCTATACC
ACCGACACCGAGTGCGATCTCACCGATGAGATCGTGAAAGATGTGAAACAG
ACCTACCTCGCCCGGGTGTTTAGCTACCCCGCCGGCAATGTGGAGAGCACT
GGTTCCGCTGGCGAGCCTTTATACGAGAACAGCCCCGAATTTACCCCTTAC
CTCGAGACCAATTTAGGACAGCCCACCATCCAAAGCTTTGAGCAAGTTGGC
ACAAAGGTGAATGTGACAGTGGAGGACGAGCGGACTTTAGTGCGGCGGAAC
AACACCTTTCTCAGCCTCCGGGATGTGTTCGGCAAAGATTTAATCTACACA
CTGTATTACTGGAAGTCCTCTTCCTCCGGCAAGAAGACAGCTAAAACCAAC
ACAAACGAGTTTTTAATCGACGTGGATAAAGGCGAAAACTACTGTTTCAGC
GTGCAAGCTGTGATCCCCTCCCGGACCGTGAATAGGAAAAGCACCGATAGC
CCCGTTGAGTGCATGGGCCAAGAAAAGGGCGAGTTCCGGGAGAACTGGGTG
AACGTCATCAGCGATTTAAAGAAGATCGAAGATTTAATTCAGTCCATGCAT
ATCGACGCCACTTTATACACAGAATCCGACGTGCACCCCTCTTGTAAGGTG
ACCGCCATGAAATGTTTTTTACTGGAGCTGCAAGTTATCTCTTTAGAGAGC
GGAGACGCTAGCATCCACGACACCGTGGAGAATTTAATCATTTTAGCCAAT
AACTCTTTATCCAGCAACGGCAACGTGACAGAGTCCGGCTGCAAGGAGTGC
GAAGAGCTGGAGGAGAAGAACATCAAGGAGTTTCTGCAATCCTTTGTGCAC
ATTGTCCAGATGTTCATCAATACCTCC.

[0841] In some embodiments, a first chimeric polypeptide can include a sequence that is at least 80% identical (e.g., at least 82% identical, at least 84% identical, at least 86% identical, at least 88% identical, at least 90% identical, at least 92% identical, at least 94% identical, at least 96% identical, at least 98% identical, at least 99% identical, or 100% identical) to:

(SEQ ID NO: 209)
MKWVTFISLLFLFSSAYSDCDIEGKDGKQYESVLMVSIDQLLDSMKEIGSN
CLNNEFNFFKRHICDANKEGMFLFRAARKLRQFLKMNSTGDFDLHLLKVSE
GTTILLNCTGQVKGRKPAALGEAQPTKSLEENKSLKEQKKLNDLCFLKRLL
QEIKTCWNKILMGTKEHSGTTNTVAAYNLTWKSTNFKTILEWEPKPVNQVY
TVQISTKSGDWKSKCFYTTDTECDLTDEIVKDVKQTYLARVFSYPAGNVES
TGSAGEPLYENSPEFTPYLETNLGQPTIQSFEQVGTKVNVTVEDERTLVRR
NNTFLSLRDVFGKDLIYTLYYWKSSSSGKKTAKTNTNEFLIDVDKGENYCF
SVQAVIPSRTVNRKSTDSPVECMGQEKGEFRENWVNVISDLKKIEDLIQSM
HIDATLYTESDVHPSCKVTAMKCFLLELQVISLESGDASIHDTVENLIILA
NNSLSSNGNVTESGCKECEELEEKNIKEFLQSFVHIVQMFINTS.

[0842] In some embodiments, a first chimeric polypeptide is encoded by a sequence that is at least 80% identical (e.g., at least 82% identical, at least 84% identical, at least 86% identical, at least 88% identical, at least 90% identical, at least 92% identical, at least 94% identical, at least 96% identical, at least 98% identical, at least 99% identical, or 100% identical) to:

(SEQ ID NO: 210)
ATGAAGTGGGTGACCTTCATCAGCCTGCTGTTCCTGTTCTCCAGCGCCTAC
TCCGATTGCGACATCGAGGGCAAGGACGGCAAGCAGTACGAGAGCGTGCTG
ATGGTGTCCATCGACCAGCTGCTGGACAGCATGAAGGAGATCGGCTCCAAC
TGCCTCAACAACGAGTTCAACTTCTTCAAGCGGCACATCTGCGACGCCAAC
AAGGAGGGCATGTTCCTGTTCAGGGCCGCCAGGAAACTGCGGCAGTTCCTG
AAGATGAACTCCACCGGCGACTTCGACCTGCACCTGCTGAAGGTGTCCGAG
GGCACCACCATCCTGCTGAACTGCACCGGACAGGTGAAGGGCCGGAAACCT
GCTGCTCTGGGAGAGGCCCAACCCACCAAGAGCCTGGAGGAGAACAAGTCC
CTGAAGGAGCAGAAGAAGCTGAACGACCTGTGCTTCCTGAAGAGGCTGCTG
CAGGAGATCAAGACCTGCTGGAACAAGATCCTGATGGGCACCAAGGAGCAT
AGCGGCACAACCAACACAGTCGCTGCCTATAACCTCACTTGGAAGAGCACC
AACTTCAAAACCATCCTCGAATGGGAACCCAAACCCGTTAACCAAGTTTAC
ACCGTGCAGATCAGCACCAAGTCCGGCGACTGGAAGTCCAAATGTTTCTAT
ACCACCGACACCGAGTGCGATCTCACCGATGAGATCGTGAAAGATGTGAAA
CAGACCTACCTCGCCCGGGTGTTTAGCTACCCCGCCGGCAATGTGGAGAGC
ACTGGTTCCGCTGGCGAGCCTTTATACGAGAACAGCCCCGAATTTACCCCT
TACCTCGAGACCAATTTAGGACAGCCCACCATCCAAAGCTTTGAGCAAGTT
GGCACAAAGGTGAATGTGACAGTGGAGGACGAGCGGACTTTAGTGCGGCGG
AACAACACCTTTCTCAGCCTCCGGGATGTGTTCGGCAAAGATTTAATCTAC
ACACTGTATTACTGGAAGTCCTCTTCCTCCGGCAAGAAGACAGCTAAAACC
AACACAAACGAGTTTTTAATCGACGTGGATAAAGGCGAAAACTACTGTTTC
AGCGTGCAAGCTGTGATCCCCTCCCGGACCGTGAATAGGAAAAGCACCGAT
AGCCCCGTTGAGTGCATGGGCCAAGAAAAGGGCGAGTTCCGGGAGAACTGG
GTGAACGTCATCAGCGATTTAAAGAAGATCGAAGATTTAATTCAGTCCATG
CATATCGACGCCACTTTATACACAGAATCCGACGTGCACCCCTCTTGTAAG
GTGACCGCCATGAAATGTTTTTTACTGGAGCTGCAAGTTATCTCTTTAGAG
AGCGGAGACGCTAGCATCCACGACACCGTGGAGAATTTAATCATTTTAGCC
AATAACTCTTTATCCAGCAACGGCAACGTGACAGAGTCCGGCTGCAAGGAG
TGCGAAGAGCTGGAGGAGAAGAACATCAAGGAGTTTCTGCAATCCTTTGTG
CACATTGTCCAGATGTTCATCAATACCTCC.

[0843] In some embodiments, the second chimeric polypeptide can include a sequence that is at least 80% identical (e.g., at least 82% identical, at least 84% identical, at least 86% identical, at least 88% identical, at least 90% identical, at least 92% identical, at least 94% identical, at least 96% identical, at least 98% identical, at least 99% identical, or 100% identical) to:

(SEQ ID NO: 193)
IPPHVQKSVNNDMIVTDNNGAVKFPQLCKFCDVRFSTCDNQKSCMSNCSIT
SICEKPQEVCVAVWRKNDENITLETVCHDPKLPYHDFILEDAASPKCIMKE
KKKPGETFFMCSCSSDECNDNIIFSEEYNTSNPDGGGGSGGGGSGGGGSIP
PHVQKSVNNDMIVTDNNGAVKFPQLCKFCDVRFSTCDNQKSCMSNCSITSI
CEKPQEVCVAVWRKNDENITLETVCHDPKLPYHDFILEDAASPKCIMKEKK
KPGETFFMCSCSSDECNDNIIFSEEYNTSNPDITCPPPMSVEHADIWVKSY
SLYSRERYICNSGFKRKAGTSSLTECVLNKATNVAHWTTPSLKCIR.

[0844] In some embodiments, a second chimeric polypeptide is encoded by a sequence that is at least 80% identical (e.g., at least 82% identical, at least 84% identical, at least 86% identical, at least 88% identical, at least 90% identical, at least 92% identical, at least 94% identical, at least 96% identical, at least 98% identical, at least 99% identical, or 100% identical) to:

(SEQ ID NO: 257)
ATCCCCCCCCATGTGCAAAAGAGCGTGAACAACGATATGATCGTGACCGAC
AACAACGGCGCCGTGAAGTTTCCCCAGCTCTGCAAGTTCTGCGATGTCAGG
TTCAGCACCTGCGATAATCAGAAGTCCTGCATGTCCAACTGCAGCATCACC
TCCATCTGCGAGAAGCCCCAAGAAGTGTGCGTGGCCGTGTGGCGGAAAAAT
GACGAGAACATCACCCTGGAGACCGTGTGTCACGACCCCAAGCTCCCTTAT
CACGACTTCATTCTGGAGGACGCTGCCTCCCCCAAATGCATCATGAAGGAG
AAGAAGAAGCCCGGAGAGACCTTCTTTATGTGTTCCTGTAGCAGCGACGAG
TGTAACGACAACATCATCTTCAGCGAAGAGTACAACACCAGCAACCCTGAT
GGAGGTGGCGGATCCGGAGGTGGAGGTTCTGGTGGAGGTGGGAGTATTCCT
CCCCACGTGCAGAAGAGCGTGAATAATGACATGATCGTGACCGATAACAAT
GGCGCCGTGAAATTTCCCCAGCTGTGCAAATTCTGCGATGTGAGGTTTTCC
ACCTGCGACAACCAGAAGTCCTGTATGAGCAACTGCTCCATCACCTCCATC
TGTGAGAAGCCTCAGGAGGTGTGCGTGGCTGTCTGGCGGAAGAATGACGAG
AATATCACCCTGGAAACCGTCTGCCACGATCCCAAGCTGCCCTACCACGAT
TTCATCCTGGAAGACGCCGCCAGCCCTAAGTGCATCATGAAAGAGAAAAAG
AAGCCTGGCGAGACCTTTTTCATGTGCTCCTGCAGCAGCGACGAATGCAAC
GACAATATCATCTTTAGCGAGGAATACAATACCAGCAACCCCGACATTACA
TGCCCCCCTCCCATGAGCGTGGAGCACGCCGACATCTGGGTGAAGAGCTAT
AGCCTCTACAGCCGGGAGAGGTATATCTGTAACAGCGGCTTCAAGAGGAAG
GCCGGCACCAGCAGCCTCACCGAGTGCGTGCTGAATAAGGCTACCAACGTG
GCTCACTGGACAACACCCTCTTTAAAGTGCATCCGG.

[0845] In some embodiments, a second chimeric polypeptide can include a sequence that is at least 80% identical (e.g., at least 82% identical, at least 84% identical, at least 86% identical, at least 88% identical, at least 90% identical, at least 92% identical, at least 94% identical, at least 96% identical, at least 98% identical, at least 99% identical, or 100% identical) to:

(SEQ ID NO: 195)
MKWVTFISLLFLFSSAYSIPPHVQKSVNNDMIVTDNNGAVKFPQLCKFCDV
RFSTCDNQKSCMSNCSITSICEKPQEVCVAVWRKNDENITLETVCHDPKLP
YHDFILEDAASPKCIMKEKKKPGETFFMCSCSSDECNDNIIFSEEYNTSNP
DGGGGSGGGGSGGGGSIPPHVQKSVNNDMIVTDNNGAVKFPQLCKFCDVRF
STCDNQKSCMSNCSITSICEKPQEVCVAVWRKNDENITLETVCHDPKLPYH
DFILEDAASPKCIMKEKKKPGETFFMCSCSSDECNDNIIFSEEYNTSNPDI
TCPPPMSVEHADIWVKSYSLYSRERYICNSGFKRKAGTSSLTECVLNKATN
VAHWTTPSLKCIR.

[0846] In some embodiments, a second chimeric polypeptide is encoded by a sequence that is at least 80% identical (e.g., at least 82% identical, at least 84% identical, at least 86% identical, at least 88% identical, at least 90% identical, at least 92% identical, at least 94% identical, at least 96% identical, at least 98% identical, at least 99% identical, or 100% identical) to:

(SEQ ID NO: 259)
ATGAAGTGGGTGACCTTCATCAGCCTGCTGTTCCTGTTCTCCAGCGCCTAC
TCCATCCCCCCCCATGTGCAAAAGAGCGTGAACAACGATATGATCGTGACC
GACAACAACGGCGCCGTGAAGTTTCCCCAGCTCTGCAAGTTCTGCGATGTC
AGGTTCAGCACCTGCGATAATCAGAAGTCCTGCATGTCCAACTGCAGCATC
ACCTCCATCTGCGAGAAGCCCCAAGAAGTGTGCGTGGCCGTGTGGCGGAAA
AATGACGAGAACATCACCCTGGAGACCGTGTGTCACGACCCCAAGCTCCCT
TATCACGACTTCATTCTGGAGGACGCTGCCTCCCCCAAATGCATCATGAAG
GAGAAGAAGAAGCCCGGAGAGACCTTCTTTATGTGTTCCTGTAGCAGCGAC
GAGTGTAACGACAACATCATCTTCAGCGAAGAGTACAACACCAGCAACCCT
GATGGAGGTGGCGGATCCGGAGGTGGAGGTTCTGGTGGAGGTGGGAGTATT
CCTCCCCACGTGCAGAAGAGCGTGAATAATGACATGATCGTGACCGATAAC
AATGGCGCCGTGAAATTTCCCCAGCTGTGCAAATTCTGCGATGTGAGGTTT
TCCACCTGCGACAACCAGAAGTCCTGTATGAGCAACTGCTCCATCACCTCC
ATCTGTGAGAAGCCTCAGGAGGTGTGCGTGGCTGTCTGGCGGAAGAATGAC
GAGAATATCACCCTGGAAACCGTCTGCCACGATCCCAAGCTGCCCTACCAC
GATTTCATCCTGGAAGACGCCGCCAGCCCTAAGTGCATCATGAAAGAGAAA
AAGAAGCCTGGCGAGACCTTTTTCATGTGCTCCTGCAGCAGCGACGAATGC
AACGACAATATCATCTTTAGCGAGGAATACAATACCAGCAACCCCGACATT
ACATGCCCCCCTCCCATGAGCGTGGAGCACGCCGACATCTGGGTGAAGAGC
TATAGCCTCTACAGCCGGGAGAGGTATATCTGTAACAGCGGCTTCAAGAGG
AAGGCCGGCACCAGCAGCCTCACCGAGTGCGTGCTGAATAAGGCTACCAAC
GTGGCTCACTGGACAACACCCTCTTTAAAGTGCATCCGG.

### Exemplary Multi-Chain Chimeric Polypeptides—Type L

[0847] In some embodiments of any of the multi-chain chimeric polypeptides described herein, the first target-binding domain and the second targeting-binding domain each independently bind specifically to TGF-β, a receptor of IL-21, or a receptor of CD137L.

[0848] In some embodiments of these multi-chain chimeric polypeptides described herein, the second chimeric polypeptide further includes the additional target-binding domain. In some embodiments of these multi-chain chimeric polypeptides described herein, the additional target-binding domain binds specifically to a receptor for IL-21 (e.g., a soluble IL-21, e.g., a soluble human IL-21) or a receptor for CD137L (e.g., a soluble CD137L, e.g., a soluble human CD137L).

[0849] In some examples of these multi-chain chimeric polypeptides, the first target-binding domain and the soluble tissue factor domain directly abut each other in the first chimeric polypeptide. In some examples of these multi-chain chimeric polypeptides, the first chimeric polypeptide further comprises a linker sequence (e.g., any of the exemplary linkers described herein) between the first target-binding domain and the soluble tissue factor domain in the first chimeric polypeptide.

[0850] In some embodiments of these multi-chain chimeric polypeptides, the soluble tissue factor domain and the first domain of the pair of affinity domains directly abut each other in the first chimeric polypeptide. In some embodiments of these multi-chain chimeric polypeptides, the first chimeric polypeptide further includes a linker sequence (e.g., any of the exemplary linkers described herein) between the soluble tissue factor domain and the first domain of the pair of affinity domains in the first chimeric polypeptide.

[0851] In some embodiments of these multi-chain chimeric polypeptides, the second domain of the pair of affinity domains and the second target-binding domain directly abut each other in the second chimeric polypeptide. In some embodiments of these multi-chain chimeric polypeptides, the second chimeric polypeptide further includes a linker sequence (e.g., any of the exemplary linkers described herein) between the second domain of the pair of affinity domains and the second target-binding domain in the second chimeric polypeptide.

[0852] In some embodiments, the second chimeric polypeptide further comprises one or more additional target-binding domains at the N-terminal end or the C-terminal end of the second chimeric polypeptide.

[0853] In some embodiments of these multi-chain chimeric polypeptides, the additional target-binding domain and the second domain of the pair of affinity domains directly abut each other in the second chimeric polypeptide. In some embodiments of these multi-chain chimeric polypeptides, the second chimeric polypeptide further includes a linker sequence (e.g., any of the exemplary linkers described herein) between the second domain of the pair of affinity domains and the additional target-binding domain in the second chimeric polypeptide.

[0854] In some embodiments of these multi-chain chimeric polypeptides, the additional target-binding domain and the second target-binding domain directly abut each other in the second chimeric polypeptide. In some embodiments of these multi-chain chimeric polypeptides, the second chimeric polypeptide further includes a linker sequence (e.g., any of the exemplary linkers described herein) between the second target-binding domain and the additional target-binding domain in the second chimeric polypeptide.

[0855] In some embodiments of these multi-chain chimeric polypeptides, the soluble tissue factor domain can be any of the exemplary soluble tissue factor domains described herein. In some embodiments of these multi-chain chimeric polypeptides, the pair of affinity domains can be any of the exemplary pairs of affinity domains described herein.

[0856] In some embodiments of these multi-chain chimeric polypeptides, one or more of the first target-binding domain, the second target-binding domain and the additional target-binding domain is an agonistic antigen-binding domain. In some embodiments of these multi-chain chimeric polypeptides, the first target-binding domain, the second target-binding domain, and the additional target-binding domain are each agonistic antigen-binding domains. In some embodiments of these multi-chain chimeric polypeptides, the antigen-binding domain includes a scFv or single-domain antibody.

[0857] In some embodiments of these multi-chain chimeric polypeptides, the first target-binding domain binds specifically to TGF-β and the second target-binding domain binds specifically to a receptor for IL-21 or a receptor for CD137L.

[0858] In some embodiments of these multi-chain chimeric polypeptides, the first target-binding domain is a soluble TGF-β receptor (e.g., a soluble TGFβRII receptor, e.g., a soluble human TGFβRII receptor). In some embodiments of these multi-chain chimeric polypeptides, the soluble human TGFRβRII includes a first sequence of soluble human TGFRβRII and a second sequence of soluble human TGFRβRII. In some embodiments of these multi-chain chimeric polypeptides, the soluble human TGFRβRII includes a linker disposed between the first sequence of soluble human TGFRβRII and the second sequence of soluble human TGFRβRII. In some examples of these multi-chain chimeric polypeptides, the linker includes the sequence GGGGSGGGGSGGGGS (SEQ ID NO: 102).

[0859] In some embodiments of these multi-chain chimeric polypeptides, the first sequence of soluble human TGFRβRII receptor comprises a sequence that is at least 80% identical (e.g., at least 82% identical, at least 84% identical, at least 86% identical, at least 88% identical, at least 90% identical, at least 92% identical, at least 94% identical, at least 96% identical, at least 98% identical, at least 99% identical, or 100% identical) to:

(SEQ ID NO: 183)
IPPHVQKSVNNDMIVTDNNGAVKFPQLCKFCDVRFSTCDNQKSCMSNCSIT
SICEKPQEVCVAVWRKNDENITLETVCHDPKLPYHDFILEDAASPKCIMKE
KKKPGETFFMCSCSSDECNDNIIFSEEYNTSNPD.

[0860] In some embodiments of these multi-chain chimeric polypeptides, the second sequence of soluble human TGFRβRII receptor comprises a sequence that is at least 80% identical (e.g., at least 82% identical, at least 84% identical, at least 86% identical, at least 88% identical, at least 90% identical, at least 92% identical, at least 94% identical, at least 96% identical, at least 98% identical, at least 99% identical, or 100% identical) to:

(SEQ ID NO: 184)
IPPHVQKSVNNDMIVTDNNGAVKFPQLCKFCDVRFSTCDNQKSCMSNCSIT
SICEKPQEVCVAVWRKNDENITLETVCHDPKLPYHDFILEDAASPKCIMKE
KKKPGETFFMCSCSSDECNDNIIFSEEYNTSNPD.

[0861] In some embodiments of these multi-chain chimeric polypeptides, the first sequence of soluble human TGFRβRII receptor is encoded by a sequence that is at least 80% identical (e.g., at least 82% identical, at least 84% identical, at least 86% identical, at least 88% identical, at least 90% identical, at least 92% identical, at least 94% identical, at least 96% identical, at least 98% identical, at least 99% identical, or 100% identical) to:

(SEQ ID NO: 185)
ATCCCCCCCCATGTGCAAAAGAGCGTGAACAACGATATGATCGTGACCGA
CAACAACGGCGCCGTGAAGTTTCCCCAGCTCTGCAAGTTCTGCGATGTCA
GGTTCAGCACCTGCGATAATCAGAAGTCCTGCATGTCCAACTGCAGCATC
ACCTCCATCTGCGAGAAGCCCCAAGAAGTGTGCGTGGCCGTGTGGCGGAA
AAATGACGAGAACATCACCCTGGAGACCGTGTGTCACGACCCCAAGCTCC
CTTATCACGACTTCATTCTGGAGGACGCTGCCTCCCCCAAATGCATCATG
AAGGAGAAGAAGAAGCCCGGAGAGACCTTCTTTATGTGTTCCTGTAGCAG
CGACGAGTGTAACGACAACATCATCTTCAGCGAAGAGTACAACACCAGCA
ACCCTGAT.

[0862] In some embodiments of these multi-chain chimeric polypeptides, the second sequence of soluble human TGFRβRII receptor is encoded by a sequence that is at least 80% identical (e.g., at least 82% identical, at least 84% identical, at least 86% identical, at least 88% identical, at least 90% identical, at least 92% identical, at least 94% identical, at least 96% identical, at least 98% identical, at least 99% identical, or 100% identical) to:

(SEQ ID NO: 186)
ATTCCTCCCCACGTGCAGAAGAGCGTGAATAATGACATGATCGTGACCGA
TAACAATGGCGCCGTGAAATTTCCCCAGCTGTGCAAATTCTGCGATGTGA
GGTTTTCCACCTGCGACAACCAGAAGTCCTGTATGAGCAACTGCTCCATC
ACCTCCATCTGTGAGAAGCCTCAGGAGGTGTGCGTGGCTGTCTGGCGGAA
GAATGACGAGAATATCACCCTGGAAACCGTCTGCCACGATCCCAAGCTGC
CCTACCACGATTTCATCCTGGAAGACGCCGCCAGCCCTAAGTGCATCATG
AAAGAGAAAAAGAAGCCTGGCGAGACCTTTTTCATGTGCTCCTGCAGCAG
CGACGAATGCAACGACAATATCATCTTTAGCGAGGAATACAATACCAGCA
ACCCCGAC.

[0863] In some embodiments of these multi-chain chimeric polypeptides, the soluble TGF-β receptor includes a sequence that is at least 80% identical (e.g., at least 82% identical, at least 84% identical, at least 86% identical, at least 88% identical, at least 90% identical, at least 92% identical, at least 94% identical, at least 96% identical, at least 98% identical, at least 99% identical, or 100% identical) to:

(SEQ ID NO: 188)
IPPHVQKSVNNDMIVTDNNGAVKFPQLCKFCDVRFSTCDNQKSCMSNCSIT
SICEKPQEVCVAVWRKNDENITLETVCHDPKLPYHDFILEDAASPKCIMKE
KKKPGETFFMCSCSSDECNDNIIFSEEYNTSNPDGGGGSGGGGSGGGGSIP
PHVQKSVNNDMIVTDNNGAVKFPQLCKFCDVRFSTCDNQKSCMSNCSITSI
CEKPQEVCVAVWRKNDENITLETVCHDPKLPYHDFILEDAASPKCIMKEKK
KPGETFFMCSCSSDECNDNIIFSEEYNTSNPD.

[0864] In some embodiments of these multi-chain chimeric polypeptides, the soluble TGF-β receptor is encoded by a sequence that is at least 80% identical (e.g., at least 82% identical, at least 84% identical, at least 86% identical, at least 88% identical, at least 90% identical, at least 92% identical, at least 94% identical, at least 96% identical, at least 98% identical, at least 99% identical, or 100% identical) to:

(SEQ ID NO: 187)
ATCCCCCCCCATGTGCAAAAGAGCGTGAACAACGATATGATCGTGACCGAC
AACAACGGCGCCGTGAAGTTTCCCCAGCTCTGCAAGTTCTGCGATGTCAGG
TTCAGCACCTGCGATAATCAGAAGTCCTGCATGTCCAACTGCAGCATCACC
TCCATCTGCGAGAAGCCCCAAGAAGTGTGCGTGGCCGTGTGGCGGAAAAAT
GACGAGAACATCACCCTGGAGACCGTGTGTCACGACCCCAAGCTCCCTTAT
CACGACTTCATTCTGGAGGACGCTGCCTCCCCCAAATGCATCATGAAGGAG
AAGAAGAAGCCCGGAGAGACCTTCTTTATGTGTTCCTGTAGCAGCGACGAG
TGTAACGACAACATCATCTTCAGCGAAGAGTACAACACCAGCAACCCTGAT
GGAGGTGGCGGATCCGGAGGTGGAGGTTCTGGTGGAGGTGGGAGTATTCCT
CCCCACGTGCAGAAGAGCGTGAATAATGACATGATCGTGACCGATAACAAT
GGCGCCGTGAAATTTCCCCAGCTGTGCAAATTCTGCGATGTGAGGTTTTCC
ACCTGCGACAACCAGAAGTCCTGTATGAGCAACTGCTCCATCACCTCCATC
TGTGAGAAGCCTCAGGAGGTGTGCGTGGCTGTCTGGCGGAAGAATGACGAG
AATATCACCCTGGAAACCGTCTGCCACGATCCCAAGCTGCCCTACCACGAT
TTCATCCTGGAAGACGCCGCCAGCCCTAAGTGCATCATGAAAGAGAAAAAG
AAGCCTGGCGAGACCTTTTTCATGTGCTCCTGCAGCAGCGACGAATGCAAC
GACAATATCATCTTTAGCGAGGAATACAATACCAGCAACCCCGAC.

[0865] In some embodiments of these multi-chain chimeric polypeptides, the second target-binding domain or the additional target-binding domain binds specifically to a receptor for IL-21. In some embodiments of these multi-chain chimeric polypeptides, the second target-binding domain or the additional target-binding domain includes a soluble IL-21 (e.g., a soluble human IL-21).

[0866] In some embodiments of these multi-chain chimeric polypeptides, a soluble human IL-21 includes a sequence that is at least 80% identical (e.g., at least 82% identical, at least 84% identical, at least 86% identical, at least 88% identical, at least 90% identical, at least 92% identical, at least 94% identical, at least 96% identical, at least 98% identical, at least 99% identical, or 100% identical) to:

(SEQ ID NO: 83)
[sequence omitted]

[0867] In some embodiments of these multi-chain chimeric polypeptides, the soluble human IL-21 is encoded by a sequence that is at least 80% identical (e.g., at least 82% identical, at least 84% identical, at least 86% identical, at least 88% identical, at least 90% identical, at least 92% identical, at least 94% identical, at least 96% identical, at least 98% identical, at least 99% identical, or 100% identical) to:

(SEQ ID NO: 182)
CAGGGCCAGGACAGGCACATGATCCGGATGAGGCAGCTCATCGACATCGTC
GACCAGCTGAAGAACTACGTGAACGACCTGGTGCCCGAGTTTCTGCCTGCC
CCCGAGGACGTGGAGACCAACTGCGAGTGGTCCGCCTTCTCCTGCTTTCAG
AAGGCCCAGCTGAAGTCCGCCAACACCGGCAACAACGAGCGGATCATCAAC
GTGAGCATCAAGAAGCTGAAGCGGAAGCCTCCCTCCACAAACGCCGGCAGG
AGGCAGAAGCACAGGCTGACCTGCCCCAGCTGTGACTCCTACGAGAAGAAG
CCCCCCAAGGAGTTCCTGGAGAGGTTCAAGTCCCTGCTGCAGAAGATGATC
CATCAGCACCTGTCCTCCAGGACCCACGGCTCCGAGGACTCC.

[0868] In some embodiments of these multi-chain chimeric polypeptides, the second target-binding domain or the additional target-binding domain binds specifically to a receptor for CD137L. In some embodiments of these multi-chain chimeric polypeptides, the second target-binding domain and/or the additional target-binding domain includes a soluble CD137L (e.g., a soluble human CD137L).

[0869] In some embodiments of these multi-chain chimeric polypeptides, a soluble CD137L includes a sequence that is at least 80% identical (e.g., at least 82% identical, at least 84% identical, at least 86% identical, at least 88% identical, at least 90% identical, at least 92% identical, at least 94% identical, at least 96% identical, at least 98% identical, at least 99% identical, or 100% identical) to:

(SEQ ID NO: 260)
REGPELSPDDPAGLLDLRQGMFAQLVAQNVLLIDGPLSWYSDPGLAGVSLT
GGLSYKEDTKELVVAKAGVYYVFFQLELRRVVAGEGSGSVSLALHLQPLRS
AAGAAALALTVDLPPASSEARNSAFGFQGRLLHLSAGQRLGVHLHTEARAR
HAWQLTQGATVLGLFRVTPEIPAGLPSPRSE.

[0870] In some embodiments of these multi-chain chimeric polypeptides, a soluble CD137L is encoded by a sequence that is at least 80% identical (e.g., at least 82% identical, at least 84% identical, at least 86% identical, at least 88% identical, at least 90% identical, at least 92% identical, at least 94% identical, at least 96% identical, at least 98% identical, at least 99% identical, or 100% identical) to:

(SEQ ID NO: 261)
CGCGAGGGTCCCGAGCTTTCGCCCGACGATCCCGCCGGCCTCTTGGACCTG
CGGCAGGGCATGTTTGCGCAGCTGGTGGCCCAAAATGTTCTGCTGATCGAT
GGGCCCCTGAGCTGGTACAGTGACCCAGGCCTGGCAGGCGTGTCCCTGACG
GGGGGCCTGAGCTACAAAGAGGACACGAAGGAGCTGGTGGTGGCCAAGGCT
GGAGTCTACTATGTCTTCTTTCAACTAGAGCTGCGGCGCGTGGTGGCCGGC
GAGGGCTCAGGCTCCGTTTCACTTGCGCTGCACCTGCAGCCACTGCGCTCT
GCTGCTGGGGCCGCCGCCCTGGCTTTGACCGTGGACCTGCCACCCGCCTCC
TCCGAGGCTCGGAACTCGGCCTTCGGTTTCCAGGGCCGCTTGCTGCACCTG
AGTGCCGGCCAGCGCCTGGGCGTCCATCTTCACACTGAGGCCAGGGCACGC
CATGCCTGGCAGCTTACCCAGGGCGCCACAGTCTTGGGACTCTTCCGGGTG
ACCCCCGAAATCCCAGCCGGACTCCCTTCACCGAGGTCGGAA.

[0871] In some embodiments of these multi-chain chimeric polypeptides, a soluble human CD137L includes a sequence that is at least 80% identical (e.g., at least 85%, at least 90%, at least 95%, at least 96%, at least 97%, at least 98%, at least 99%, or 100% identical) to:

(SEQ ID NO: 262)
DPAGLLDLRQGMFAQLVAQNVLLIDGPLSWYSDPGLAGVSLTGGLSYKEDT
KELVVAKAGVYYVFFQLELRRVVAGEGSGSVSLALHLQPLRSAAGAAALAL
TVDLPPASSEARNSAFGFQGRLLHLSAGQRLGVHLHTEARARHAWQLTQGA
TVLGLFRVTPEI.

[0872] In some embodiments of these multi-chain chimeric polypeptides, a soluble human CD137L is encoded by a sequence that is at least 80% identical (e.g., at least 85%, at least 90%, at least 95%, at least 96%, at least 97%, at least 98%, at least 99%, or 100% identical) to:

(SEQ ID NO: 263)
GATCCCGCCGGCCTCTTGGACCTGCGGCAGGGCATGTTTGCGCAGCTGGTG
GCCCAAAATGTTCTGCTGATCGATGGGCCCCTGAGCTGGTACAGTGACCCA
GGCCTGGCAGGCGTGTCCCTGACGGGGGGCCTGAGCTACAAAGAGGACACG
AAGGAGCTGGTGGTGGCCAAGGCTGGAGTCTACTATGTCTTCTTTCAACTA
GAGCTGCGGCGCGTGGTGGCCGGCGAGGGCTCAGGCTCCGTTTCACTTGCG
CTGCACCTGCAGCCACTGCGCTCTGCTGCTGGGGCCGCCGCCCTGGCTTTG
ACCGTGGACCTGCCACCCGCCTCCTCCGAGGCTCGGAACTCGGCCTTCGGT
TTCCAGGGCCGCTTGCTGCACCTGAGTGCCGGCCAGCGCCTGGGCGTCCAT
CTTCACACTGAGGCCAGGGCACGCCATGCCTGGCAGCTTACCCAGGGCGCC
ACAGTCTTGGGACTCTTCCGGGTGACCCCCGAAATC.

[0873] In some embodiments, the first chimeric polypeptide can include a sequence that is at least 80% identical (e.g., at least 82% identical, at least 84% identical, at least 86% identical, at least 88% identical, at least 90% identical, at least 92% identical, at least 94% identical, at least 96% identical, at least 98% identical, at least 99% identical, or 100% identical) to:

(SEO ID NO: 236)
IPPHVQKSVNNDMIVTDNNGAVKFPQLCKFCDVRFSTCDNQKSCMSNCSIT
SICEKPQEVCVAVWRKNDENITLETVCHDPKLPYHDFILEDAASPKCIMKE
KKKPGETFFMCSCSSDECNDNIIFSEEYNTSNPDGGGGSGGGGSGGGGSIP
PHVQKSVNNDMIVTDNNGAVKFPQLCKFCDVRFSTCDNQKSCMSNCSITSI
CEKPQEVCVAVWRKNDENITLETVCHDPKLPYHDFILEDAASPKCIMKEKK
KPGETFFMCSCSSDECNDNIIFSEEYNTSNPDSGTTNTVAAYNLTWKSTNF
KTILEWEPKPVNQVYTVQISTKSGDWKSKCFYTTDTECDLTDEIVKDVKQT
YLARVFSYPAGNVESTGSAGEPLYENSPEFTPYLETNLGQPTIQSFEQVGT
KVNVTVEDERTLVRRNNTFLSLRDVFGKDLIYTLYYWKSSSSGKKTAKTNT
NEFLIDVDKGENYCFSVQAVIPSRTVNRKSTDSPVECMGQEKGEFRENWVN
VISDLKKIEDLIQSMHIDATLYTESDVHPSCKVTAMKCFLLELQVISLESG
DASIHDTVENLIILANNSLSSNGNVTESGCKECEELEEKNIKEFLQSFVHI
VOMFINTS.

[0874] In some embodiments, a first chimeric polypeptide is encoded by a sequence that is at least 80% identical (e.g., at least 82% identical, at least 84% identical, at least 86% identical, at least 88% identical, at least 90% identical, at least 92% identical, at least 94% identical, at least 96% identical, at least 98% identical, at least 99% identical, or 100% identical) to:

(SEQ ID NO: 237)
ATCCCCCCCCATGTGCAAAAGAGCGTGAACAACGATATGATCGTGACCGAC
AACAACGGCGCCGTGAAGTTTCCCCAGCTCTGCAAGTTCTGCGATGTCAGG
TTCAGCACCTGCGATAATCAGAAGTCCTGCATGTCCAACTGCAGCATCACC
TCCATCTGCGAGAAGCCCCAAGAAGTGTGCGTGGCCGTGTGGCGGAAAAAT
GACGAGAACATCACCCTGGAGACCGTGTGTCACGACCCCAAGCTCCCTTAT
CACGACTTCATTCTGGAGGACGCTGCCTCCCCCAAATGCATCATGAAGGAG
AAGAAGAAGCCCGGAGAGACCTTCTTTATGTGTTCCTGTAGCAGCGACGAG
TGTAACGACAACATCATCTTCAGCGAAGAGTACAACACCAGCAACCCTGAT
GGAGGTGGCGGATCCGGAGGTGGAGGTTCTGGTGGAGGTGGGAGTATTCCT
CCCCACGTGCAGAAGAGCGTGAATAATGACATGATCGTGACCGATAACAAT
GGCGCCGTGAAATTTCCCCAGCTGTGCAAATTCTGCGATGTGAGGTTTTCC
ACCTGCGACAACCAGAAGTCCTGTATGAGCAACTGCTCCATCACCTCCATC
TGTGAGAAGCCTCAGGAGGTGTGCGTGGCTGTCTGGCGGAAGAATGACGAG
AATATCACCCTGGAAACCGTCTGCCACGATCCCAAGCTGCCCTACCACGAT
TTCATCCTGGAAGACGCCGCCAGCCCTAAGTGCATCATGAAAGAGAAAAAG
AAGCCTGGCGAGACCTTTTTCATGTGCTCCTGCAGCAGCGACGAATGCAAC
GACAATATCATCTTTAGCGAGGAATACAATACCAGCAACCCCGACAGCGGC
ACAACCAACACAGTCGCTGCCTATAACCTCACTTGGAAGAGCACCAACTTC
AAAACCATCCTCGAATGGGAACCCAAACCCGTTAACCAAGTTTACACCGTG
CAGATCAGCACCAAGTCCGGCGACTGGAAGTCCAAATGTTTCTATACCACC
GACACCGAGTGCGATCTCACCGATGAGATCGTGAAAGATGTGAAACAGACC
TACCTCGCCCGGGTGTTTAGCTACCCCGCCGGCAATGTGGAGAGCACTGGT
TCCGCTGGCGAGCCTTTATACGAGAACAGCCCCGAATTTACCCCTTACCTC
GAGACCAATTTAGGACAGCCCACCATCCAAAGCTTTGAGCAAGTTGGCACA
AAGGTGAATGTGACAGTGGAGGACGAGCGGACTTTAGTGCGGCGGAACAAC
ACCTTTCTCAGCCTCCGGGATGTGTTCGGCAAAGATTTAATCTACACACTG
TATTACTGGAAGTCCTCTTCCTCCGGCAAGAAGACAGCTAAAACCAACACA
AACGAGTTTTTAATCGACGTGGATAAAGGCGAAAACTACTGTTTCAGCGTG
CAAGCTGTGATCCCCTCCCGGACCGTGAATAGGAAAAGCACCGATAGCCCC
GTTGAGTGCATGGGCCAAGAAAAGGGCGAGTTCCGGGAGAACTGGGTGAAC
GTCATCAGCGATTTAAAGAAGATCGAAGATTTAATTCAGTCCATGCATATC
GACGCCACTTTATACACAGAATCCGACGTGCACCCCTCTTGTAAGGTGACC
GCCATGAAATGTTTTTTACTGGAGCTGCAAGTTATCTCTTTAGAGAGCGGA
GACGCTAGCATCCACGACACCGTGGAGAATTTAATCATTTTAGCCAATAAC
TCTTTATCCAGCAACGGCAACGTGACAGAGTCCGGCTGCAAGGAGTGCGAA
GAGCTGGAGGAGAAGAACATCAAGGAGTTTCTGCAATCCTTTGTGCACATT
GTCCAGATGTTCATCAATACCTCC.

[0875] In some embodiments, a first chimeric polypeptide can include a sequence that is at least 80% identical (e.g., at least 82% identical, at least 84% identical, at least 86% identical, at least 88% identical, at least 90% identical, at least 92% identical, at least 94% identical, at least 96% identical, at least 98% identical, at least 99% identical, or 100% identical) to:

(SEQ ID NO: 238)
MKWVTFISLLFLFSSAYSIPPHVQKSVNNDMIVTDNNGAVKFPQLCKFCDV
RSTCDNQKSCMSNCSITSICEKPQEVCVAVWRKNDENITLETVCHDPKLPY
HDFILEDAASPKCIMKEKKKPGETFFMCSCSSDECNDNIIFSEEYNTSNPD
GGGGSGGGGSGGGGSIPPHVQKSVNNDMIVTDNNGAVKFPQLCKFCDVRFS
TCDNQKSCMSNCSITSICEKPQEVCVAVWRKNDENITLETVCHDPKLPYHD
FILEDAASPKCIMKEKKKPGETFFMCSCSSDECNDNIIFSEEYNTSNPDSG
TTNTVAAYNLTWKSTNFKTILEWEPKPVNQVYTVQISTKSGDWKSKCFYTT
DTECDLTDEIVKDVKQTYLARVFSYPAGNVESTGSAGEPLYENSPEFTPYL
ETNLGQPTIQSFEQVGTKVNVTVEDERTLVRRNNTFLSLRDVFGKDLIYTL
YYWKSSSSGKKTAKTNTNEFLIDVDKGENYCFSVQAVIPSRTVNRKSTDSP
VECMGQEKGEFRENWVNVISDLKKIEDLIQSMHIDATLYTESDVHPSCKVT
AMKCFLLELQVISLESGDASIHDTVENLIILANNSLSSNGNVTESGCKECE
ELEEKNIKEFLQSFVHIVQMFINTS.

[0876] In some embodiments, a first chimeric polypeptide is encoded by a sequence that is at least 80% identical (e.g., at least 82% identical, at least 84% identical, at least 86% identical, at least 88% identical, at least 90% identical, at least 92% identical, at least 94% identical, at least 96% identical, at least 98% identical, at least 99% identical, or 100% identical) to:

(SEQ ID NO: 239)
ATGAAGTGGGTGACCTTCATCAGCCTGCTGTTCCTGTTCTCCAGCGCCTAC
TCCATCCCCCCCCATGTGCAAAAGAGCGTGAACAACGATATGATCGTGACC
GACAACAACGGCGCCGTGAAGTTTCCCCAGCTCTGCAAGTTCTGCGATGTC
AGGTTCAGCACCTGCGATAATCAGAAGTCCTGCATGTCCAACTGCAGCATC
ACCTCCATCTGCGAGAAGCCCCAAGAAGTGTGCGTGGCCGTGTGGCGGAAA
AATGACGAGAACATCACCCTGGAGACCGTGTGTCACGACCCCAAGCTCCCT
TATCACGACTTCATTCTGGAGGACGCTGCCTCCCCCAAATGCATCATGAAG
GAGAAGAAGAAGCCCGGAGAGACCTTCTTTATGTGTTCCTGTAGCAGCGAC
GAGTGTAACGACAACATCATCTTCAGCGAAGAGTACAACACCAGCAACCCT
GATGGAGGTGGCGGATCCGGAGGTGGAGGTTCTGGTGGAGGTGGGAGTATT
CCTCCCCACGTGCAGAAGAGCGTGAATAATGACATGATCGTGACCGATAAC
AATGGCGCCGTGAAATTTCCCCAGCTGTGCAAATTCTGCGATGTGAGGTTT
TCCACCTGCGACAACCAGAAGTCCTGTATGAGCAACTGCTCCATCACCTCC
ATCTGTGAGAAGCCTCAGGAGGTGTGCGTGGCTGTCTGGCGGAAGAATGAC
GAGAATATCACCCTGGAAACCGTCTGCCACGATCCCAAGCTGCCCTACCAC
GATTTCATCCTGGAAGACGCCGCCAGCCCTAAGTGCATCATGAAAGAGAAA
AAGAAGCCTGGCGAGACCTTTTTCATGTGCTCCTGCAGCAGCGACGAATGC
AACGACAATATCATCTTTAGCGAGGAATACAATACCAGCAACCCCGACAGC
GGCACAACCAACACAGTCGCTGCCTATAACCTCACTTGGAAGAGCACCAAC
TTCAAAACCATCCTCGAATGGGAACCCAAACCCGTTAACCAAGTTTACACC
GTGCAGATCAGCACCAAGTCCGGCGACTGGAAGTCCAAATGTTTCTATACC
ACCGACACCGAGTGCGATCTCACCGATGAGATCGTGAAAGATGTGAAACAG
ACCTACCTCGCCCGGGTGTTTAGCTACCCCGCCGGCAATGTGGAGAGCACT
GGTTCCGCTGGCGAGCCTTTATACGAGAACAGCCCCGAATTTACCCCTTAC
CTCGAGACCAATTTAGGACAGCCCACCATCCAAAGCTTTGAGCAAGTTGGC
ACAAAGGTGAATGTGACAGTGGAGGACGAGCGGACTTTAGTGCGGCGGAAC
AACACCTTTCTCAGCCTCCGGGATGTGTTCGGCAAAGATTTAATCTACACA
CTGTATTACTGGAAGTCCTCTTCCTCCGGCAAGAAGACAGCTAAAACCAAC
ACAAACGAGTTTTTAATCGACGTGGATAAAGGCGAAAACTACTGTTTCAGC
GTGCAAGCTGTGATCCCCTCCCGGACCGTGAATAGGAAAAGCACCGATAGC
CCCGTTGAGTGCATGGGCCAAGAAAAGGGCGAGTTCCGGGAGAACTGGGTG
AACGTCATCAGCGATTTAAAGAAGATCGAAGATTTAATTCAGTCCATGCAT
ATCGACGCCACTTTATACACAGAATCCGACGTGCACCCCTCTTGTAAGGTG
ACCGCCATGAAATGTTTTTTACTGGAGCTGCAAGTTATCTCTTTAGAGAGC
GGAGACGCTAGCATCCACGACACCGTGGAGAATTTAATCATTTTAGCCAAT
AACTCTTTATCCAGCAACGGCAACGTGACAGAGTCCGGCTGCAAGGAGTGC
GAAGAGCTGGAGGAGAAGAACATCAAGGAGTTTCTGCAATCCTTTGTGCAC
ATTGTCCAGATGTTCATCAATACCTCC.

[0877] In some embodiments, the second chimeric polypeptide can include a sequence that is at least 80% identical (e.g., at least 82% identical, at least 84% identical, at least 86% identical, at least 88% identical, at least 90% identical, at least 92% identical, at least 94% identical, at least 96% identical, at least 98% identical, at least 99% identical, or 100% identical) to:

(SEQ ID NO: 268)
QGQDRHMIRMRQLIDIVDQLKNYVNDLVPEFLPAPEDVETNCEWSAFSCFQ
KAQLKSANTGNNERIINVSIKKLKRKPPSTNAGRRQKHRLTCPSCDSYEKK
PPKEFLERFKSLLQKMIHQHLSSRTHGSEDSITCPPPMSVEHADIWVKSYS
LYSRERYICNSGFKRKAGTSSLTECVLNKATNVAHWTTPSLKCIRGGGGSG
GGGSGGGGSREGPELSPDDPAGLLDLRQGMFAQLVAQNVLLIDGPLSWYSD
PGLAGVSLTGGLSYKEDTKELVVAKAGVYYVFFQLELRRVVAGEGSGSVSL
ALHLQPLRSAAGAAALALTVDLPPASSEARNSAFGFQGRLLHLSAGQRLGV
HLHTEARARHAWQLTQGATVLGLFRVTPEIPAGLPSPRSE.

[0878] In some embodiments, a second chimeric polypeptide is encoded by a sequence that is at least 80% identical (e.g., at least 82% identical, at least 84% identical, at least 86% identical, at least 88% identical, at least 90% identical, at least 92% identical, at least 94% identical, at least 96% identical, at least 98% identical, at least 99% identical, or 100% identical) to:

(SEQ ID NO: 269)
CAGGGCCAGGACAGGCACATGATCCGGATGAGGCAGCTCATCGACATCGTC
GACCAGCTGAAGAACTACGTGAACGACCTGGTGCCCGAGTTTCTGCCTGCC
CCCGAGGACGTGGAGACCAACTGCGAGTGGTCCGCCTTCTCCTGCTTTCAG
AAGGCCCAGCTGAAGTCCGCCAACACCGGCAACAACGAGCGGATCATCAAC
GTGAGCATCAAGAAGCTGAAGCGGAAGCCTCCCTCCACAAACGCCGGCAGG
AGGCAGAAGCACAGGCTGACCTGCCCCAGCTGTGACTCCTACGAGAAGAAG
CCCCCCAAGGAGTTCCTGGAGAGGTTCAAGTCCCTGCTGCAGAAGATGATC
CATCAGCACCTGTCCTCCAGGACCCACGGCTCCGAGGACTCCATTACATGC
CCCCCTCCCATGAGCGTGGAGCACGCCGACATCTGGGTGAAGAGCTATAGC
CTCTACAGCCGGGAGAGGTATATCTGTAACAGCGGCTTCAAGAGGAAGGCC
GGCACCAGCAGCCTCACCGAGTGCGTGCTGAATAAGGCTACCAACGTGGCT
CACTGGACAACACCCTCTTTAAAGTGCATCCGGGGCGGTGGAGGATCCGGA
GGAGGTGGCTCCGGCGGCGGAGGATCTCGCGAGGGTCCCGAGCTTTCGCCC
GACGATCCCGCCGGCCTCTTGGACCTGCGGCAGGGCATGTTTGCGCAGCTG
GTGGCCCAAAATGTTCTGCTGATCGATGGGCCCCTGAGCTGGTACAGTGAC
CCAGGCCTGGCAGGCGTGTCCCTGACGGGGGGCCTGAGCTACAAAGAGGAC
ACGAAGGAGCTGGTGGTGGCCAAGGCTGGAGTCTACTATGTCTTCTTTCAA
CTAGAGCTGCGGCGCGTGGTGGCCGGCGAGGGCTCAGGCTCCGTTTCACTT
GCGCTGCACCTGCAGCCACTGCGCTCTGCTGCTGGGGCCGCCGCCCTGGCT
TTGACCGTGGACCTGCCACCCGCCTCCTCCGAGGCTCGGAACTCGGCCTTC
GGTTTCCAGGGCCGCTTGCTGCACCTGAGTGCCGGCCAGCGCCTGGGCGTC
CATCTTCACACTGAGGCCAGGGCACGCCATGCCTGGCAGCTTACCCAGGGC
GCCACAGTCTTGGGACTCTTCCGGGTGACCCCCGAAATCCCAGCCGGACTC
CCTTCACCGAGGTCGGAA

[0879] In some embodiments, a second chimeric polypeptide can include a sequence that is at least 80% identical (e.g., at least 82% identical, at least 84% identical, at least 86% identical, at least 88% identical, at least 90% identical, at least 92% identical, at least 94% identical, at least 96% identical, at least 98% identical, at least 99% identical, or 100% identical) to:

(SEQ ID NO: 270)
MKWVTFISLLFLFSSAYSQGQDRHMIRMRQLIDIVDQLKNYVNDLVP
EFLPAPEDVETNCEWSAFSCFQKAQLKSANTGNNERIINVSIKKLKR
KPPSTNAGRRQKHRLTCPSCDSYEKKPPKEFLERFKSLLQKMIHQHL
SSRTHGSEDSITCPPPMSVEHADIWVKSYSLYSRERYICNSGFKRKA
GTSSLTECVLNKATNVAHWTTPSLKCIRGGGGSGGGGSGGGGSREGP
ELSPDDPAGLLDLRQGMFAQLVAQNVLLIDGPLSWYSDPGLAGVSLT
GGLSYKEDTKELVVAKAGVYYVFFQLELRRVVAGEGSGSVSLALHLQ
PLRSAAGAAALALTVDLPPASSEARNSAFGFQGRLLHLSAGQRLGVH
LHTEARARHAWQLTQGATVLGLFRVTPEIPAGLPSPRSE.

[0880] In some embodiments, a second chimeric polypeptide is encoded by a sequence that is at least 80% identical (e.g., at least 82% identical, at least 84% identical, at least 86% identical, at least 88% identical, at least 90% identical, at least 92% identical, at least 94% identical, at least 96% identical, at least 98% identical, at least 99% identical, or 100% identical) to:

(SEQ ID NO: 27l)
ATGAAGTGGGTGACCTTCATCAGCCTGCTGTTCCTGTTCTCCAGCGC
CTACTCCCAGGGCCAGGACAGGCACATGATCCGGATGAGGCAGCTCA
TCGACATCGTCGACCAGCTGAAGAACTACGTGAACGACCTGGTGCCC
GAGTTTCTGCCTGCCCCCGAGGACGTGGAGACCAACTGCGAGTGGTC
CGCCTTCTCCTGCTTTCAGAAGGCCCAGCTGAAGTCCGCCAACACCG
GCAACAACGAGCGGATCATCAACGTGAGCATCAAGAAGCTGAAGCGG
AAGCCTCCCTCCACAAACGCCGGCAGGAGGCAGAAGCACAGGCTGAC
CTGCCCCAGCTGTGACTCCTACGAGAAGAAGCCCCCCAAGGAGTTCC
TGGAGAGGTTCAAGTCCCTGCTGCAGAAGATGATCCATCAGCACCTG
TCCTCCAGGACCCACGGCTCCGAGGACTCCATTACATGCCCCCCTCC
CATGAGCGTGGAGCACGCCGACATCTGGGTGAAGAGCTATAGCCTCT
ACAGCCGGGAGAGGTATATCTGTAACAGCGGCTTCAAGAGGAAGGCC
GGCACCAGCAGCCTCACCGAGTGCGTGCTGAATAAGGCTACCAACGT
GGCTCACTGGACAACACCCTCTTTAAAGTGCATCCGGGGCGGTGGAG
GATCCGGAGGAGGTGGCTCCGGCGGCGGAGGATCTCGCGAGGGTCCC
GAGCTTTCGCCCGACGATCCCGCCGGCCTCTTGGACCTGCGGCAGGG
CATGTTTGCGCAGCTGGTGGCCCAAAATGTTCTGCTGATCGATGGGC
CCCTGAGCTGGTACAGTGACCCAGGCCTGGCAGGCGTGTCCCTGACG
GGGGGCCTGAGCTACAAAGAGGACACGAAGGAGCTGGTGGTGGCCAA
GGCTGGAGTCTACTATGTCTTCTTTCAACTAGAGCTGCGGCGCGTGG
TGGCCGGCGAGGGCTCAGGCTCCGTTTCACTTGCGCTGCACCTGCAG
CCACTGCGCTCTGCTGCTGGGGCCGCCGCCCTGGCTTTGACCGTGGA
CCTGCCACCCGCCTCCTCCGAGGCTCGGAACTCGGCCTTCGGTTTCC
AGGGCCGCTTGCTGCACCTGAGTGCCGGCCAGCGCCTGGGCGTCCAT
CTTCACACTGAGGCCAGGGCACGCCATGCCTGGCAGCTTACCCAGGG
CGCCACAGTCTTGGGACTCTTCCGGGTGACCCCCGAAATCCCAGCCG
GACTCCCTTCACCGAGGTCGGAA

[0881] In some embodiments, the second chimeric polypeptide can include a sequence that is at least 80% identical (e.g., at least 82% identical, at least 84% identical, at least 86% identical, at least 88% identical, at least 90% identical, at least 92% identical, at least 94% identical, at least 96% identical, at least 98% identical, at least 99% identical, or 100% identical) to:

(SEQ ID NO: 272)
QGQDRHMIRMRQLIDIVDQLKNYVNDLVPEFLPAPEDVETNCEWSAFS
CFQKAQLKSANTGNNERIINVSIKKLKRKPPSTNAGRRQKHRLTCPSC
DSYEKKPPKEFLERFKSLLQKMIHQHLSSRTHGSEDSITCPPPMSVEH
ADIWVKSYSLYSRERYICNSGFKRKAGTSSLTECVLNKATNVAHWTTP
SLKCIRGGGGSGGGGSGGGGSDPAGLLDLRQGMFAQLVAQNVLLIDGP
LSWYSDPGLAGVSLTGGLSYKEDTKELVVAKAGVYYVFFQLELRRVVA
GEGSGSVSLALHLQPLRSAAGAAALALTVDLPPASSEARNSAFGFQGR
LLHLSAGQRLGVHLHTEARARHAWQLTQGATVLGLFRVTPEI.

[0882] In some embodiments, a second chimeric polypeptide is encoded by a sequence that is at least 80% identical (e.g., at least 82% identical, at least 84% identical, at least 86% identical, at least 88% identical, at least 90% identical, at least 92% identical, at least 94% identical, at least 96% identical, at least 98% identical, at least 99% identical, or 100% identical) to:

(SEQ ID NO: 273)
CAGGGCCAGGACAGGCACATGATCCGGATGAGGCAGCTCATCGACATC
GTCGACCAGCTGAAGAACTACGTGAACGACCTGGTGCCCGAGTTTCTG
CCTGCCCCCGAGGACGTGGAGACCAACTGCGAGTGGTCCGCCTTCTCC
TGCTTTCAGAAGGCCCAGCTGAAGTCCGCCAACACCGGCAACAACGAG
CGGATCATCAACGTGAGCATCAAGAAGCTGAAGCGGAAGCCTCCCTCC
ACAAACGCCGGCAGGAGGCAGAAGCACAGGCTGACCTGCCCCAGCTGT
GACTCCTACGAGAAGAAGCCCCCCAAGGAGTTCCTGGAGAGGTTCAAG
TCCCTGCTGCAGAAGATGATCCATCAGCACCTGTCCTCCAGGACCCAC
GGCTCCGAGGACTCCATTACATGCCCCCCTCCCATGAGCGTGGAGCAC
GCCGACATCTGGGTGAAGAGCTATAGCCTCTACAGCCGGGAGAGGTAT
ATCTGTAACAGCGGCTTCAAGAGGAAGGCCGGCACCAGCAGCCTCACC
GAGTGCGTGCTGAATAAGGCTACCAACGTGGCTCACTGGACAACACCC
TCTTTAAAGTGCATCCGGGGCGGTGGAGGATCCGGAGGAGGTGGCTCC
GGCGGCGGAGGATCTGATCCCGCCGGCCTCTTGGACCTGCGGCAGGGC
ATGTTTGCGCAGCTGGTGGCCCAAAATGTTCTGCTGATCGATGGGCCC
CTGAGCTGGTACAGTGACCCAGGCCTGGCAGGCGTGTCCCTGACGGGG
GGCCTGAGCTACAAAGAGGACACGAAGGAGCTGGTGGTGGCCAAGGCT
GGAGTCTACTATGTCTTCTTTCAACTAGAGCTGCGGCGCGTGGTGGCC
GGCGAGGGCTCAGGCTCCGTTTCACTTGCGCTGCACCTGCAGCCACTG
CGCTCTGCTGCTGGGGCCGCCGCCCTGGCTTTGACCGTGGACCTGCCA
CCCGCCTCCTCCGAGGCTCGGAACTCGGCCTTCGGTTTCCAGGGCCGC
TTGCTGCACCTGAGTGCCGGCCAGCGCCTGGGCGTCCATCTTCACACT
GAGGCCAGGGCACGCCATGCCTGGCAGCTTACCCAGGGCGCCACAGTC
TTGGGACTCTTCCGGGTGACCCCCGAAATC.

[0883] In some embodiments, the second chimeric polypeptide can include a sequence that is at least 80% identical (e.g., at least 82% identical, at least 84% identical, at least 86% identical, at least 88% identical, at least 90% identical, at least 92% identical, at least 94% identical, at least 96% identical, at least 98% identical, at least 99% identical, or 100% identical) to:

(SEQ ID NO: 274)
MKWVTFISLLFLFSSAYSQGQDRHMIRMRQLIDIVDQLKNYVNDLVPEF
LPAPEDVETNCEWSAFSCFQKAQLKSANTGNNERIINVSIKKLKRKPPS
TNAGRRQKHRLTCPSCDSYEKKPPKEFLERFKSLLQKMIHQHLSSRTHG
SEDSITCPPPMSVEHADIWVKSYSLYSRERYICNSGFKRKAGTSSLTEC
VLNKATNVAHWTTPSLKCIRGGGGSGGGGSGGGGSDPAGLLDLRQGMFA
QLVAQNVLLIDGPLSWYSDPGLAGVSLTGGLSYKEDTKELVVAKAGVYY
VFFQLELRRVVAGEGSGSVSLALHLQPLRSAAGAAALALTVDLPPASSE
ARNSAFGFQGRLLHLSAGQRLGVHLHTEARARHAWQLTQGATVLGLFRV
TPEI.

[0884] In some embodiments, a second chimeric polypeptide is encoded by a sequence that is at least 80% identical (e.g., at least 82% identical, at least 84% identical, at least 86% identical, at least 88% identical, at least 90% identical, at least 92% identical, at least 94% identical, at least 96% identical, at least 98% identical, at least 99% identical, or 100% identical) to:

(SEQ ID NO: 275)
ATGAAGTGGGTGACCTTCATCAGCCTGCTGTTCCTGTTCTCCAGCGCCT
ACTCCCAGGGCCAGGACAGGCACATGATCCGGATGAGGCAGCTCATCGA
CATCGTCGACCAGCTGAAGAACTACGTGAACGACCTGGTGCCCGAGTTT
CTGCCTGCCCCCGAGGACGTGGAGACCAACTGCGAGTGGTCCGCCTTCT
CCTGCTTTCAGAAGGCCCAGCTGAAGTCCGCCAACACCGGCAACAACGA
GCGGATCATCAACGTGAGCATCAAGAAGCTGAAGCGGAAGCCTCCCTCC
ACAAACGCCGGCAGGAGGCAGAAGCACAGGCTGACCTGCCCCAGCTGTG
ACTCCTACGAGAAGAAGCCCCCCAAGGAGTTCCTGGAGAGGTTCAAGTC
CCTGCTGCAGAAGATGATCCATCAGCACCTGTCCTCCAGGACCCACGGC
TCCGAGGACTCCATTACATGCCCCCCTCCCATGAGCGTGGAGCACGCCG
ACATCTGGGTGAAGAGCTATAGCCTCTACAGCCGGGAGAGGTATATCTG
TAACAGCGGCTTCAAGAGGAAGGCCGGCACCAGCAGCCTCACCGAGTGC
GTGCTGAATAAGGCTACCAACGTGGCTCACTGGACAACACCCTCTTTAA
AGTGCATCCGGGGCGGTGGAGGATCCGGAGGAGGTGGCTCCGGCGGCGG
AGGATCTGATCCCGCCGGCCTCTTGGACCTGCGGCAGGGCATGTTTGCG
CAGCTGGTGGCCCAAAATGTTCTGCTGATCGATGGGCCCCTGAGCTGGT
ACAGTGACCCAGGCCTGGCAGGCGTGTCCCTGACGGGGGGCCTGAGCTA
CAAAGAGGACACGAAGGAGCTGGTGGTGGCCAAGGCTGGAGTCTACTAT
GTCTTCTTTCAACTAGAGCTGCGGCGCGTGGTGGCCGGCGAGGGCTCAG
GCTCCGTTTCACTTGCGCTGCACCTGCAGCCACTGCGCTCTGCTGCTGG
GGCCGCCGCCCTGGCTTTGACCGTGGACCTGCCACCCGCCTCCTCCGAG
GCTCGGAACTCGGCCTTCGGTTTCCAGGGCCGCTTGCTGCACCTGAGTG
CCGGCCAGCGCCTGGGCGTCCATCTTCACACTGAGGCCAGGGCACGCCA
TGCCTGGCAGCTTACCCAGGGCGCCACAGTCTTGGGACTCTTCCGGGTG
ACCCCCGAAATC.

### Exemplary Multi-Chain Chimeric Polypeptides—Type M

[0885] In some embodiments of any of the multi-chain chimeric polypeptides described herein, the first target-binding domain and the second targeting-binding domain each independently bind specifically to TGF-β or a receptor of IL-21. In some embodiments of these multi-chain chimeric polypeptides described herein, the second chimeric polypeptide further includes the additional target-binding domain. In some embodiments of these multi-chain chimeric polypeptides described herein, the additional target-binding domain binds specifically to a receptor for IL-21 (e.g., a soluble IL-21, e.g., a soluble human IL-21) or a TGF-β (e.g., a soluble TGF-β receptor, e.g., a soluble TGFβRII receptor).

[0886] In some examples of these multi-chain chimeric polypeptides, the first target-binding domain and the soluble tissue factor domain directly abut each other in the first chimeric polypeptide. In some examples of these multi-chain chimeric polypeptides, the first chimeric polypeptide further comprises a linker sequence (e.g., any of the exemplary linkers described herein) between the first target-binding domain and the soluble tissue factor domain in the first chimeric polypeptide.

[0887] In some embodiments of these multi-chain chimeric polypeptides, the soluble tissue factor domain and the first domain of the pair of affinity domains directly abut each other in the first chimeric polypeptide. In some embodiments of these multi-chain chimeric polypeptides, the first chimeric polypeptide further includes a linker sequence (e.g., any of the exemplary linkers described herein) between the soluble tissue factor domain and the first domain of the pair of affinity domains in the first chimeric polypeptide.

[0888] In some embodiments of these multi-chain chimeric polypeptides, the second domain of the pair of affinity domains and the second target-binding domain directly abut each other in the second chimeric polypeptide. In some embodiments of these multi-chain chimeric polypeptides, the second chimeric polypeptide further includes a linker sequence (e.g., any of the exemplary linkers described herein) between the second domain of the pair of affinity domains and the second target-binding domain in the second chimeric polypeptide.

[0889] In some embodiments, the second chimeric polypeptide further comprises one or more additional target-binding domains at the N-terminal end or the C-terminal end of the second chimeric polypeptide.

[0890] In some embodiments of these multi-chain chimeric polypeptides, the additional target-binding domain and the second domain of the pair of affinity domains directly abut each other in the second chimeric polypeptide. In some embodiments of these multi-chain chimeric polypeptides, the second chimeric polypeptide further includes a linker sequence (e.g., any of the exemplary linkers described herein) between the second domain of the pair of affinity domains and the additional target-binding domain in the second chimeric polypeptide.

[0891] In some embodiments of these multi-chain chimeric polypeptides, the additional target-binding domain and the second target-binding domain directly abut each other in the second chimeric polypeptide. In some embodiments of these multi-chain chimeric polypeptides, the second chimeric polypeptide further includes a linker sequence (e.g., any of the exemplary linkers described herein) between the second target-binding domain and the additional target-binding domain in the second chimeric polypeptide.

[0892] In some embodiments of these multi-chain chimeric polypeptides, the soluble tissue factor domain can be any of the exemplary soluble tissue factor domains described herein. In some embodiments of these multi-chain chimeric polypeptides, the pair of affinity domains can be any of the exemplary pairs of affinity domains described herein.

[0893] In some embodiments of these multi-chain chimeric polypeptides, the first target-binding domain binds specifically to TGF-β, and the second target-binding domain binds specifically to TGF-β or a receptor for IL-21. In some embodiments of these multi-chain chimeric polypeptides, the first target-binding domain is a soluble TGF-β receptor (e.g., a soluble TGFβRII receptor, e.g., a soluble human TGFβRII receptor). In some embodiments of these multi-chain chimeric polypeptides, the soluble human TGFRβRII includes a first sequence of soluble human TGFRβRII and a second sequence of soluble human TGFRβRII. In some embodiments of these multi-chain chimeric polypeptides, the soluble human TGFRβRII includes a linker disposed between the first sequence of soluble human TGFRβRII and the second sequence of soluble human TGFRβRII. In some examples of these multi-chain chimeric polypeptides, the linker includes the sequence GGGGSGGGGSGGGGS (SEQ ID NO: 102).

[0894] In some embodiments of these multi-chain chimeric polypeptides, the first sequence of soluble human TGFRβRII receptor comprises a sequence that is at least 80% identical (e.g., at least 82% identical, at least 84% identical, at least 86% identical, at least 88% identical, at least 90% identical, at least 92% identical, at least 94% identical, at least 96% identical, at least 98% identical, at least 99% identical, or 100% identical) to:

(SEQ ID NO: 183)
IPPHVQKSVNNDMIVTDNNGAVKFPQLCKFCDVRFSTCDNQKSCMSNCS
ITSICEKPQEVCVAVWRKNDENITLETVCHDPKLPYHDFILEDAASPKC
IMKEKKKPGETFFMCSCSSDECNDNIIFSEEYNTSNPD.

[0895] In some embodiments of these multi-chain chimeric polypeptides, the second sequence of soluble human TGFRβRII receptor comprises a sequence that is at least 80% identical (e.g., at least 82% identical, at least 84% identical, at least 86% identical, at least 88% identical, at least 90% identical, at least 92% identical, at least 94% identical, at least 96% identical, at least 98% identical, at least 99% identical, or 100% identical) to:

(SEQ ID NO: 184)
IPPHVQKSVNNDMIVTDNNGAVKFPQLCKFCDVRFSTCDNQKSCMSNCS
ITSICEKPQEVCVAVWRKNDENITLETVCHDPKLPYHDFILEDAASPKC
IMKEKKKPGETFFMCSCSSDECNDNIIFSEEYNTSNPD.

[0896] In some embodiments of these multi-chain chimeric polypeptides, the first sequence of soluble human TGFRβRII receptor is encoded by a sequence that is at least 80% identical (e.g., at least 82% identical, at least 84% identical, at least 86% identical, at least 88% identical, at least 90% identical, at least 92% identical, at least 94% identical, at least 96% identical, at least 98% identical, at least 99% identical, or 100% identical) to:

(SEQ ID NO: 185)
ATCCCCCCCCATGTGCAAAAGAGCGTGAACAACGATATGATCGTGACCG
ACAACAACGGCGCCGTGAAGTTTCCCCAGCTCTGCAAGTTCTGCGATGT
CAGGTTCAGCACCTGCGATAATCAGAAGTCCTGCATGTCCAACTGCAGC
ATCACCTCCATCTGCGAGAAGCCCCAAGAAGTGTGCGTGGCCGTGTGGC
GGAAAAATGACGAGAACATCACCCTGGAGACCGTGTGTCACGACCCCAA
GCTCCCTTATCACGACTTCATTCTGGAGGACGCTGCCTCCCCCAAATGC
ATCATGAAGGAGAAGAAGAAGCCCGGAGAGACCTTCTTTATGTGTTCCT
GTAGCAGCGACGAGTGTAACGACAACATCATCTTCAGCGAAGAGTACAA
CACCAGCAACCCTGAT.

[0897] In some embodiments of these multi-chain chimeric polypeptides, the second sequence of soluble human TGFRβRII receptor is encoded by a sequence that is at least 80% identical (e.g., at least 82% identical, at least 84% identical, at least 86% identical, at least 88% identical, at least 90% identical, at least 92% identical, at least 94% identical, at least 96% identical, at least 98% identical, at least 99% identical, or 100% identical) to:

(SEQ ID NO: 186)
ATTCCTCCCCACGTGCAGAAGAGCGTGAATAATGACATGATCGTGACCG
ATAACAATGGCGCCGTGAAATTTCCCCAGCTGTGCAAATTCTGCGATGT
GAGGTTTTCCACCTGCGACAACCAGAAGTCCTGTATGAGCAACTGCTCC
ATCACCTCCATCTGTGAGAAGCCTCAGGAGGTGTGCGTGGCTGTCTGGC
GGAAGAATGACGAGAATATCACCCTGGAAACCGTCTGCCACGATCCCAA
GCTGCCCTACCACGATTTCATCCTGGAAGACGCCGCCAGCCCTAAGTGC
ATCATGAAAGAGAAAAAGAAGCCTGGCGAGACCTTTTTCATGTGCTCCT
GCAGCAGCGACGAATGCAACGACAATATCATCTTTAGCGAGGAATACAA
TACCAGCAACCCCGAC.

[0898] In some embodiments of these multi-chain chimeric polypeptides, the soluble TGF-β receptor includes a sequence that is at least 80% identical (e.g., at least 82% identical, at least 84% identical, at least 86% identical, at least 88% identical, at least 90% identical, at least 92% identical, at least 94% identical, at least 96% identical, at least 98% identical, at least 99% identical, or 100% identical) to:

(SEQ ID NO: 188)
IPPHVQKSVNNDMIVTDNNGAVKFPQLCKFCDVRFSTCDNQKSCMSNCS
ITSICEKPQEVCVAVWRKNDENITLETVCHDPKLPYHDFILEDAASPKC
IMKEKKKPGETFFMCSCSSDECNDNIIFSEEYNTSNPDGGGGSGGGGSG
GGGSIPPHVQKSVNNDMIVTDNNGAVKFPQLCKFCDVRFSTCDNQKSCM
SNCSITSICEKPQEVCVAVWRKNDENITLETVCHDPKLPYHDFILEDAA
SPKCIMKEKKKPGETFFMCSCSSDECNDNIIFSEEYNTSNPD.

[0899] In some embodiments of these multi-chain chimeric polypeptides, the soluble TGF-β receptor is encoded by a sequence that is at least 80% identical (e.g., at least 82% identical, at least 84% identical, at least 86% identical, at least 88% identical, at least 90% identical, at least 92% identical, at least 94% identical, at least 96% identical, at least 98% identical, at least 99% identical, or 100% identical) to:

(SEQ ID NO: 187)
ATCCCCCCCCATGTGCAAAAGAGCGTGAACAACGATATGATCGTGACCG
ACAACAACGGCGCCGTGAAGTTTCCCCAGCTCTGCAAGTTCTGCGATGT
CAGGTTCAGCACCTGCGATAATCAGAAGTCCTGCATGTCCAACTGCAGC
ATCACCTCCATCTGCGAGAAGCCCCAAGAAGTGTGCGTGGCCGTGTGGC
GGAAAAATGACGAGAACATCACCCTGGAGACCGTGTGTCACGACCCCAA
GCTCCCTTATCACGACTTCATTCTGGAGGACGCTGCCTCCCCCAAATGC
ATCATGAAGGAGAAGAAGAAGCCCGGAGAGACCTTCTTTATGTGTTCCT
GTAGCAGCGACGAGTGTAACGACAACATCATCTTCAGCGAAGAGTACAA
CACCAGCAACCCTGATGGAGGTGGCGGATCCGGAGGTGGAGGTTCTGGT
GGAGGTGGGAGTATTCCTCCCCACGTGCAGAAGAGCGTGAATAATGACA
TGATCGTGACCGATAACAATGGCGCCGTGAAATTTCCCCAGCTGTGCAA
ATTCTGCGATGTGAGGTTTTCCACCTGCGACAACCAGAAGTCCTGTATG
AGCAACTGCTCCATCACCTCCATCTGTGAGAAGCCTCAGGAGGTGTGCG
TGGCTGTCTGGCGGAAGAATGACGAGAATATCACCCTGGAAACCGTCTG
CCACGATCCCAAGCTGCCCTACCACGATTTCATCCTGGAAGACGCCGCC
AGCCCTAAGTGCATCATGAAAGAGAAAAAGAAGCCTGGCGAGACCTTTT
TCATGTGCTCCTGCAGCAGCGACGAATGCAACGACAATATCATCTTTAG
CGAGGAATACAATACCAGCAACCCCGAC.

[0900] In some embodiments of these multi-chain chimeric polypeptides, the second target-binding domain binds specifically to a receptor for IL-21. In some embodiments of these multi-chain chimeric polypeptides, the second target-binding domain includes a soluble IL-21 (e.g., a human soluble IL-21). In some embodiments of these multi-chain chimeric polypeptides, the soluble IL-21 includes a sequence that is at least 80% identical (e.g., at least 82% identical, at least 84% identical, at least 86% identical, at least 88% identical, at least 90% identical, at least 92% identical, at least 94% identical, at least 96% identical, at least 98% identical, at least 99% identical, or 100% identical) to:

(SEQ ID NO: 83)
[sequence omitted]

[0901] In some embodiments of these multi-chain chimeric polypeptides, the soluble IL-21 is encoded by a sequence that is at least 80% identical (e.g., at least 82% identical, at least 84% identical, at least 86% identical, at least 88% identical, at least 90% identical, at least 92% identical, at least 94% identical, at least 96% identical, at least 98% identical, at least 99% identical, or 100% identical) to:

(SEQ ID NO: 182)
CAGGGCCAGGACAGGCACATGATCGGATGAGGCAGCTCATCGACATCGT
CGACCAGCTGAAGAACTACGTGAACGACCTGGTGCCCGAGTTTCTGCCT
GCCCCCGAGGACGTGGAGACCAACTGCGAGTGGTCCGCCTTCTCCTGCT
TTCAGAAGGCCCAGCTGAAGTCCGCCAACACCGGCAACAACGAGCGGAT
CATCAACGTGAGCATCAAGAAGCTGAAGCGGAAGCCTCCCTCCACAAAC
GCCGGCAGGAGGCAGAAGCACAGGCTGACCTGCCCCAGCTGTGACTCCT
ACGAGAAGAAGCCCCCCAAGGAGTTCCTGGAGAGGTTCAAGTCCCTGCT
GCAGAAGATGATCCATCAGCACCTGTCCTCCAGGACCCACGGCTCCGAG
GACTCC

[0902] In some embodiments, the first chimeric polypeptide can include a sequence that is at least 80% identical (e.g., at least 82% identical, at least 84% identical, at least 86% identical, at least 88% identical, at least 90% identical, at least 92% identical, at least 94% identical, at least 96% identical, at least 98% identical, at least 99% identical, or 100% identical) to:

(SEQ ID NO: 236)
IPPHVQKSVNNDMIVTDNNGAVKFPQLCKFCDVRFSTCDNQKSCMSNCS
ITSICEKPQEVCVAVWRKNDENITLETVCHDPKLPYHDFILEDAASPKC
IMKEKKKPGETFFMCSCSSDECNDNIIFSEEYNTSNPDGGGGSGGGGSG
GGGSIPPHVQKSVNNDMIVTDNNGAVKFPQLCKFCDVRFSTCDNQKSCM
SNCSITSICEKPQEVCVAVWRKNDENITLETVCHDPKLPYHDFILEDAA
SPKCIMKEKKKPGETFFMCSCSSDECNDNIIFSEEYNTSNPDSGTTNTV
AAYNLTWKSTNFKTILEWEPKPVNQVYTVQISTKSGDWKSKCFYTTDTE
CDLTDEIVKDVKQTYLARVFSYPAGNVESTGSAGEPLYENSPEFTPYLE
TNLGQPTIQSFEQVGTKVNVTVEDERTLVRRNNTFLSLRDVFGKDLIYT
LYYWKSSSSGKKTAKTNTNEFLIDVDKGENYCFSVQAVIPSRTVNRKST
DSPVECMGQEKGEFRENWVNVISDLKKIEDLIQSMHIDATLYTESDVHP
SCKVTAMKCFLLELQVISLESGDASIHDTVENLIILANNSLSSNGNVTE
SGCKECEELEEKNIKEFLQSFVHIVQMFINTS.

[0903] In some embodiments, a first chimeric polypeptide is encoded by a sequence that is at least 80% identical (e.g., at least 82% identical, at least 84% identical, at least 86% identical, at least 88% identical, at least 90% identical, at least 92% identical, at least 94% identical, at least 96% identical, at least 98% identical, at least 99% identical, or 100% identical) to:

(SEQ ID NO: 237)
ATCCCCCCCCATGTGCAAAAGAGCGTGAACAACGATATGATCGTGACCGAC
AACAACGGCGCCGTGAAGTTTCCCCAGCTCTGCAAGTTCTGCGATGTCAGG
TTCAGCACCTGCGATAATCAGAAGTCCTGCATGTCCAACTGCAGCATCACC
TCCATCTGCGAGAAGCCCCAAGAAGTGTGCGTGGCCGTGTGGCGGAAAAAT
GACGAGAACATCACCCTGGAGACCGTGTGTCACGACCCCAAGCTCCCTTAT
CACGACTTCATTCTGGAGGACGCTGCCTCCCCCAAATGCATCATGAAGGAG
AAGAAGAAGCCCGGAGAGACCTTCTTTATGTGTTCCTGTAGCAGCGACGAG
TGTAACGACAACATCATCTTCAGCGAAGAGTACAACACCAGCAACCCTGAT
GGAGGTGGCGGATCCGGAGGTGGAGGTTCTGGTGGAGGTGGGAGTATTCCT
CCCCACGTGCAGAAGAGCGTGAATAATGACATGATCGTGACCGATAACAAT
GGCGCCGTGAAATTTCCCCAGCTGTGCAAATTCTGCGATGTGAGGTTTTCC
ACCTGCGACAACCAGAAGTCCTGTATGAGCAACTGCTCCATCACCTCCATC
TGTGAGAAGCCTCAGGAGGTGTGCGTGGCTGTCTGGCGGAAGAATGACGAG
AATATCACCCTGGAAACCGTCTGCCACGATCCCAAGCTGCCCTACCACGAT
TTCATCCTGGAAGACGCCGCCAGCCCTAAGTGCATCATGAAAGAGAAAAAG
AAGCCTGGCGAGACCTTTTTCATGTGCTCCTGCAGCAGCGACGAATGCAAC
GACAATATCATCTTTAGCGAGGAATACAATACCAGCAACCCCGACAGCGGC
ACAACCAACACAGTCGCTGCCTATAACCTCACTTGGAAGAGCACCAACTTC
AAAACCATCCTCGAATGGGAACCCAAACCCGTTAACCAAGTTTACACCGTG
CAGATCAGCACCAAGTCCGGCGACTGGAAGTCCAAATGTTTCTATACCACC
GACACCGAGTGCGATCTCACCGATGAGATCGTGAAAGATGTGAAACAGACC
TACCTCGCCCGGGTGTTTAGCTACCCCGCCGGCAATGTGGAGAGCACTGGT
TCCGCTGGCGAGCCTTTATACGAGAACAGCCCCGAATTTACCCCTTACCTC
GAGACCAATTTAGGACAGCCCACCATCCAAAGCTTTGAGCAAGTTGGCACA
AAGGTGAATGTGACAGTGGAGGACGAGCGGACTTTAGTGCGGCGGAACAAC
ACCTTTCTCAGCCTCCGGGATGTGTTCGGCAAAGATTTAATCTACACACTG
TATTACTGGAAGTCCTCTTCCTCCGGCAAGAAGACAGCTAAAACCAACACA
AACGAGTTTTTAATCGACGTGGATAAAGGCGAAAACTACTGTTTCAGCGTG
CAAGCTGTGATCCCCTCCCGGACCGTGAATAGGAAAAGCACCGATAGCCCC
GTTGAGTGCATGGGCCAAGAAAAGGGCGAGTTCCGGGAGAACTGGGTGAAC
GTCATCAGCGATTTAAAGAAGATCGAAGATTTAATTCAGTCCATGCATATC
GACGCCACTTTATACACAGAATCCGACGTGCACCCCTCTTGTAAGGTGACC
GCCATGAAATGTTTTTTACTGGAGCTGCAAGTTATCTCTTTAGAGAGCGGA
GACGCTAGCATCCACGACACCGTGGAGAATTTAATCATTTTAGCCAATAAC
TCTTTATCCAGCAACGGCAACGTGACAGAGTCCGGCTGCAAGGAGTGCGAA
GAGCTGGAGGAGAAGAACATCAAGGAGTTTCTGCAATCCTTTGTGCACATT
GTCCAGATGTTCATCAATACCTCC.

[0904] In some embodiments, a first chimeric polypeptide can include a sequence that is at least 80% identical (e.g., at least 82% identical, at least 84% identical, at least 86% identical, at least 88% identical, at least 90% identical, at least 92% identical, at least 94% identical, at least 96% identical, at least 98% identical, at least 99% identical, or 100% identical) to:

(SEQ ID NO: 238)
MKWVTFISLLFLFSSAYSIPPHVQKSVNNDMIVTDNNGAVKFPQLCKFCDV
RFSTCDNQKSCMSNCSITSICEKPQEVCVAVWRKNDENITLETVCHDPKLP
YHDFILEDAASPKCIMKEKKKPGETFFMCSCSSDECNDNIIFSEEYNTSNP
DGGGGSGGGGSGGGGSIPPHVQKSVNNDMIVTDNNGAVKFPQLCKFCDVRF
STCDNQKSCMSNCSITSICEKPQEVCVAVWRKNDENITLETVCHDPKLPYH
DFILEDAASPKCIMKEKKKPGETFFMCSCSSDECNDNIIFSEEYNTSNPDS
GTTNTVAAYNLTWKSTNFKTILEWEPKPVNQVYTVQISTKSGDWKSKCFYT
TDTECDLTDEIVKDVKQTYLARVFSYPAGNVESTGSAGEPLYENSPEFTPY
LETNLGQPTIQSFEQVGTKVNVTVEDERTLVRRNNTFLSLRDVFGKDLIYT
LYYWKSSSSGKKTAKTNTNEFLIDVDKGENYCFSVQAVIPSRTVNRKSTDS
PVECMGQEKGEFRENWVNVISDLKKIEDLIQSMHIDATLYTESDVHPSCKV
TAMKCFLLELQVISLESGDASIHDTVENLIILANNSLSSNGNVTESGCKEC
EELEEKNIKEFLQSFVHIVQMFINTS.

[0905] In some embodiments, a first chimeric polypeptide is encoded by a sequence that is at least 80% identical (e.g., at least 82% identical, at least 84% identical, at least 86% identical, at least 88% identical, at least 90% identical, at least 92% identical, at least 94% identical, at least 96% identical, at least 98% identical, at least 99% identical, or 100% identical) to:

(SEQ ID NO: 239)
ATGAAGTGGGTGACCTTCATCAGCCTGCTGTTCCTGTTCTCCAGCGCCTAC
TCCATCCCCCCCCATGTGCAAAAGAGCGTGAACAACGATATGATCGTGACC
GACAACAACGGCGCCGTGAAGTTTCCCCAGCTCTGCAAGTTCTGCGATGTC
AGGTTCAGCACCTGCGATAATCAGAAGTCCTGCATGTCCAACTGCAGCATC
ACCTCCATCTGCGAGAAGCCCCAAGAAGTGTGCGTGGCCGTGTGGCGGAAA
AATGACGAGAACATCACCCTGGAGACCGTGTGTCACGACCCCAAGCTCCCT
TATCACGACTTCATTCTGGAGGACGCTGCCTCCCCCAAATGCATCATGAAG
GAGAAGAAGAAGCCCGGAGAGACCTTCTTTATGTGTTCCTGTAGCAGCGAC
GAGTGTAACGACAACATCATCTTCAGCGAAGAGTACAACACCAGCAACCCT
GATGGAGGTGGCGGATCCGGAGGTGGAGGTTCTGGTGGAGGTGGGAGTATT
CCTCCCCACGTGCAGAAGAGCGTGAATAATGACATGATCGTGACCGATAAC
AATGGCGCCGTGAAATTTCCCCAGCTGTGCAAATTCTGCGATGTGAGGTTT
TCCACCTGCGACAACCAGAAGTCCTGTATGAGCAACTGCTCCATCACCTCC
ATCTGTGAGAAGCCTCAGGAGGTGTGCGTGGCTGTCTGGCGGAAGAATGAC
GAGAATATCACCCTGGAAACCGTCTGCCACGATCCCAAGCTGCCCTACCAC
GATTTCATCCTGGAAGACGCCGCCAGCCCTAAGTGCATCATGAAAGAGAAA
AAGAAGCCTGGCGAGACCTTTTTCATGTGCTCCTGCAGCAGCGACGAATGC
AACGACAATATCATCTTTAGCGAGGAATACAATACCAGCAACCCCGACAGC
GGCACAACCAACACAGTCGCTGCCTATAACCTCACTTGGAAGAGCACCAAC
TTCAAAACCATCCTCGAATGGGAACCCAAACCCGTTAACCAAGTTTACACC
GTGCAGATCAGCACCAAGTCCGGCGACTGGAAGTCCAAATGTTTCTATACC
ACCGACACCGAGTGCGATCTCACCGATGAGATCGTGAAAGATGTGAAACAG
ACCTACCTCGCCCGGGTGTTTAGCTACCCCGCCGGCAATGTGGAGAGCACT
GGTTCCGCTGGCGAGCCTTTATACGAGAACAGCCCCGAATTTACCCCTTAC
CTCGAGACCAATTTAGGACAGCCCACCATCCAAAGCTTTGAGCAAGTTGGC
ACAAAGGTGAATGTGACAGTGGAGGACGAGCGGACTTTAGTGCGGCGGAAC
AACACCTTTCTCAGCCTCCGGGATGTGTTCGGCAAAGATTTAATCTACACA
CTGTATTACTGGAAGTCCTCTTCCTCCGGCAAGAAGACAGCTAAAACCAAC
ACAAACGAGTTTTTAATCGACGTGGATAAAGGCGAAAACTACTGTTTCAGC
GTGCAAGCTGTGATCCCCTCCCGGACCGTGAATAGGAAAAGCACCGATAGC
CCCGTTGAGTGCATGGGCCAAGAAAAGGGCGAGTTCCGGGAGAACTGGGTG
AACGTCATCAGCGATTTAAAGAAGATCGAAGATTTAATTCAGTCCATGCAT
ATCGACGCCACTTTATACACAGAATCCGACGTGCACCCCTCTTGTAAGGTG
ACCGCCATGAAATGTTTTTTACTGGAGCTGCAAGTTATCTCTTTAGAGAGC
GGAGACGCTAGCATCCACGACACCGTGGAGAATTTAATCATTTTAGCCAAT
AACTCTTTATCCAGCAACGGCAACGTGACAGAGTCCGGCTGCAAGGAGTGC
GAAGAGCTGGAGGAGAAGAACATCAAGGAGTTTCTGCAATCCTTTGTGCAC
ATTGTCCAGATGTTCATCAATACCTCC.

[0906] In some embodiments, the second chimeric polypeptide can include a sequence that is at least 80% identical (e.g., at least 82% identical, at least 84% identical, at least 86% identical, at least 88% identical, at least 90% identical, at least 92% identical, at least 94% identical, at least 96% identical, at least 98% identical, at least 99% identical, or 100% identical) to:

(SEQ ID NO: 300)
IPPHVQKSVNNDMIVTDNNGAVKFPQLCKFCDVRFSTCDNQKSCMSNCSIT
SICEKPQEVCVAVWRKNDENITLETVCHDPKLPYHDFILEDAASPKCIMKE
KKKPGETFFMCSCSSDECNDNIIFSEEYNTSNPDGGGGSGGGGSGGGGSIP
PHVQKSVNNDMIVTDNNGAVKFPQLCKFCDVRFSTCDNQKSCMSNCSITSI
CEKPQEVCVAVWRKNDENITLETVCHDPKLPYHDFILEDAASPKCIMKEKK
KPGETFFMCSCSSDECNDNIIFSEEYNTSNPDITCPPPMSVEHADIWVKSY
SLYSRERYICNSGFKRKAGTSSLTECVLNKATNVAHWTTPSLKCIRQGQDR
HMIRMRQLIDIVDQLKNYVNDLVPEFLPAPEDVETNCEWSAFSCFQKAQLK
SANTGNNERIINVSIKKLKRKPPSTNAGRRQKHRLTCPSCDSYEKKPPKEF
LERFKSLLQKMIHQHLSSRTHGSEDS.

[0907] In some embodiments, a second chimeric polypeptide is encoded by a sequence that is at least 80% identical (e.g., at least 82% identical, at least 84% identical, at least 86% identical, at least 88% identical, at least 90% identical, at least 92% identical, at least 94% identical, at least 96% identical, at least 98% identical, at least 99% identical, or 100% identical) to:

(SEQ ID NO: 301)
ATCCCCCCCCATGTGCAAAAGAGCGTGAACAACGATATGATCGTGACCGAC
AACAACGGCGCCGTGAAGTTTCCCCAGCTCTGCAAGTTCTGCGATGTCAGG
TTCAGCACCTGCGATAATCAGAAGTCCTGCATGTCCAACTGCAGCATCACC
TCCATCTGCGAGAAGCCCCAAGAAGTGTGCGTGGCCGTGTGGCGGAAAAAT
GACGAGAACATCACCCTGGAGACCGTGTGTCACGACCCCAAGCTCCCTTAT
CACGACTTCATTCTGGAGGACGCTGCCTCCCCCAAATGCATCATGAAGGAG
AAGAAGAAGCCCGGAGAGACCTTCTTTATGTGTTCCTGTAGCAGCGACGAG
TGTAACGACAACATCATCTTCAGCGAAGAGTACAACACCAGCAACCCTGAT
GGAGGTGGCGGATCCGGAGGTGGAGGTTCTGGTGGAGGTGGGAGTATTCCT
CCCCACGTGCAGAAGAGCGTGAATAATGACATGATCGTGACCGATAACAAT
GGCGCCGTGAAATTTCCCCAGCTGTGCAAATTCTGCGATGTGAGGTTTTCC
ACCTGCGACAACCAGAAGTCCTGTATGAGCAACTGCTCCATCACCTCCATC
TGTGAGAAGCCTCAGGAGGTGTGCGTGGCTGTCTGGCGGAAGAATGACGAG
AATATCACCCTGGAAACCGTCTGCCACGATCCCAAGCTGCCCTACCACGAT
TTCATCCTGGAAGACGCCGCCAGCCCTAAGTGCATCATGAAAGAGAAAAAG
AAGCCTGGCGAGACCTTTTTCATGTGCTCCTGCAGCAGCGACGAATGCAAC
GACAATATCATCTTTAGCGAGGAATACAATACCAGCAACCCCGACATTACA
TGCCCCCCTCCCATGAGCGTGGAGCACGCCGACATCTGGGTGAAGAGCTAT
AGCCTCTACAGCCGGGAGAGGTATATCTGTAACAGCGGCTTCAAGAGGAAG
GCCGGCACCAGCAGCCTCACCGAGTGCGTGCTGAATAAGGCTACCAACGTG
GCTCACTGGACAACACCCTCTTTAAAGTGCATCCGGCAGGGCCAGGACAGG
CACATGATCCGGATGAGGCAGCTCATCGACATCGTCGACCAGCTGAAGAAC
TACGTGAACGACCTGGTGCCCGAGTTTCTGCCTGCCCCCGAGGACGTGGAG
ACCAACTGCGAGTGGTCCGCCTTCTCCTGCTTTCAGAAGGCCCAGCTGAAG
TCCGCCAACACCGGCAACAACGAGCGGATCATCAACGTGAGCATCAAGAAG
CTGAAGCGGAAGCCTCCCTCCACAAACGCCGGCAGGAGGCAGAAGCACAGG
CTGACCTGCCCCAGCTGTGACTCCTACGAGAAGAAGCCCCCCAAGGAGTTC
CTGGAGAGGTTCAAGTCCCTGCTGCAGAAGATGATCCATCAGCACCTGTCC
TCCAGGACCCACGGCTCCGAGGACTCC.

[0908] In some embodiments, a second chimeric polypeptide can include a sequence that is at least 80% identical (e.g., at least 82% identical, at least 84% identical, at least 86% identical, at least 88% identical, at least 90% identical, at least 92% identical, at least 94% identical, at least 96% identical, at least 98% identical, at least 99% identical, or 100% identical) to:

(SEQ ID NO: 302)
MKWVTFISLLFLFSSAYSIPPHVQKSVNNDMIVTDNNGAVKFPQLCKFCDV
RFSTCDNQKSCMSNCSITSICEKPQEVCVAVWRKNDENITLETVCHDPKLP
YHDFILEDAASPKCIMKEKKKPGETFFMCSCSSDECNDNIIFSEEYNTSNP
DGGGGSGGGGSGGGGSIPPHVQKSVNNDMIVTDNNGAVKFPQLCKFCDVRF
STCDNQKSCMSNCSITSICEKPQEVCVAVWRKNDENITLETVCHDPKLPYH
DFILEDAASPKCIMKEKKKPGETFFMCSCSSDECNDNIIFSEEYNTSNPDI
TCPPPMSVEHADIWVKSYSLYSRERYICNSGFKRKAGTSSLTECVLNKATN
VAHWTTPSLKCIRQGQDRHMIRMRQLIDIVDQLKNYVNDLVPEFLPAPEDV
ETNCEWSAFSCFQKAQLKSANTGNNERIINVSIKKLKRKPPSTNAGRRQKH
RLTCPSCDSYEKKPPKEFLERFKSLLQKMIHQHLSSRTHGSEDS.

[0909] In some embodiments, a second chimeric polypeptide is encoded by a sequence that is at least 80% identical (e.g., at least 82% identical, at least 84% identical, at least 86% identical, at least 88% identical, at least 90% identical, at least 92% identical, at least 94% identical, at least 96% identical, at least 98% identical, at least 99% identical, or 100% identical) to:

(SEQ ID NO: 303)
ATGAAGTGGGTGACCTTCATCAGCCTGCTGTTCCTGTTCTCCAGCGCCTAC
TCCATCCCCCCCCATGTGCAAAAGAGCGTGAACAACGATATGATCGTGACC
GACAACAACGGCGCCGTGAAGTTTCCCCAGCTCTGCAAGTTCTGCGATGTC
AGGTTCAGCACCTGCGATAATCAGAAGTCCTGCATGTCCAACTGCAGCATC
ACCTCCATCTGCGAGAAGCCCCAAGAAGTGTGCGTGGCCGTGTGGCGGAAA
AATGACGAGAACATCACCCTGGAGACCGTGTGTCACGACCCCAAGCTCCCT
TATCACGACTTCATTCTGGAGGACGCTGCCTCCCCCAAATGCATCATGAAG
GAGAAGAAGAAGCCCGGAGAGACCTTCTTTATGTGTTCCTGTAGCAGCGAC
GAGTGTAACGACAACATCATCTTCAGCGAAGAGTACAACACCAGCAACCCT
GATGGAGGTGGCGGATCCGGAGGTGGAGGTTCTGGTGGAGGTGGGAGTATT
CCTCCCCACGTGCAGAAGAGCGTGAATAATGACATGATCGTGACCGATAAC
AATGGCGCCGTGAAATTTCCCCAGCTGTGCAAATTCTGCGATGTGAGGTTT
TCCACCTGCGACAACCAGAAGTCCTGTATGAGCAACTGCTCCATCACCTCC
ATCTGTGAGAAGCCTCAGGAGGTGTGCGTGGCTGTCTGGCGGAAGAATGAC
GAGAATATCACCCTGGAAACCGTCTGCCACGATCCCAAGCTGCCCTACCAC
GATTTCATCCTGGAAGACGCCGCCAGCCCTAAGTGCATCATGAAAGAGAAA
AAGAAGCCTGGCGAGACCTTTTTCATGTGCTCCTGCAGCAGCGACGAATGC
AACGACAATATCATCTTTAGCGAGGAATACAATACCAGCAACCCCGACATT
ACATGCCCCCCTCCCATGAGCGTGGAGCACGCCGACATCTGGGTGAAGAGC
TATAGCCTCTACAGCCGGGAGAGGTATATCTGTAACAGCGGCTTCAAGAGG
AAGGCCGGCACCAGCAGCCTCACCGAGTGCGTGCTGAATAAGGCTACCAAC
GTGGCTCACTGGACAACACCCTCTTTAAAGTGCATCCGGCAGGGCCAGGAC
AGGCACATGATCCGGATGAGGCAGCTCATCGACATCGTCGACCAGCTGAAG
AACTACGTGAACGACCTGGTGCCCGAGTTTCTGCCTGCCCCCGAGGACGTG
GAGACCAACTGCGAGTGGTCCGCCTTCTCCTGCTTTCAGAAGGCCCAGCTG
AAGTCCGCCAACACCGGCAACAACGAGCGGATCATCAACGTGAGCATCAAG
AAGCTGAAGCGGAAGCCTCCCTCCACAAACGCCGGCAGGAGGCAGAAGCAC
AGGCTGACCTGCCCCAGCTGTGACTCCTACGAGAAGAAGCCCCCCAAGGAG
TTCCTGGAGAGGTTCAAGTCCCTGCTGCAGAAGATGATCCATCAGCACCTG
TCCTCCAGGACCCACGGCTCCGAGGACTCC.

### Exemplary Multi-Chain Chimeric Polypeptides—Type N

[0910] In some embodiments of any of the multi-chain chimeric polypeptides described herein, the first target-binding domain and the second targeting-binding domain each independently bind specifically to TGF-β or CD16. In some embodiments of these multi-chain chimeric polypeptides described herein, the second chimeric polypeptide further includes the additional target-binding domain. In some embodiments of these multi-chain chimeric polypeptides described herein, the additional target-binding domain binds specifically to CD16 (e.g., an anti-CD16 scFv) or a TGF-β (e.g., a soluble TGF-β receptor, e.g., a soluble TGFβRII receptor).

[0911] In some examples of these multi-chain chimeric polypeptides, the first target-binding domain and the soluble tissue factor domain directly abut each other in the first chimeric polypeptide. In some examples of these multi-chain chimeric polypeptides, the first chimeric polypeptide further comprises a linker sequence (e.g., any of the exemplary linkers described herein) between the first target-binding domain and the soluble tissue factor domain in the first chimeric polypeptide.

[0912] In some embodiments of these multi-chain chimeric polypeptides, the soluble tissue factor domain and the first domain of the pair of affinity domains directly abut each other in the first chimeric polypeptide. In some embodiments of these multi-chain chimeric polypeptides, the first chimeric polypeptide further includes a linker sequence (e.g., any of the exemplary linkers described herein) between the soluble tissue factor domain and the first domain of the pair of affinity domains in the first chimeric polypeptide.

[0913] In some embodiments of these multi-chain chimeric polypeptides, the second domain of the pair of affinity domains and the second target-binding domain directly abut each other in the second chimeric polypeptide. In some embodiments of these multi-chain chimeric polypeptides, the second chimeric polypeptide further includes a linker sequence (e.g., any of the exemplary linkers described herein) between the second domain of the pair of affinity domains and the second target-binding domain in the second chimeric polypeptide.

[0914] In some embodiments, the second chimeric polypeptide further comprises one or more additional target-binding domains at the N-terminal end or the C-terminal end of the second chimeric polypeptide.

[0915] In some embodiments of these multi-chain chimeric polypeptides, the additional target-binding domain and the second domain of the pair of affinity domains directly abut each other in the second chimeric polypeptide. In some embodiments of these multi-chain chimeric polypeptides, the second chimeric polypeptide further includes a linker sequence (e.g., any of the exemplary linkers described herein) between the second domain of the pair of affinity domains and the additional target-binding domain in the second chimeric polypeptide.

[0916] In some embodiments of these multi-chain chimeric polypeptides, the additional target-binding domain and the second target-binding domain directly abut each other in the second chimeric polypeptide. In some embodiments of these multi-chain chimeric polypeptides, the second chimeric polypeptide further includes a linker sequence (e.g., any of the exemplary linkers described herein) between the second target-binding domain and the additional target-binding domain in the second chimeric polypeptide.

[0917] In some embodiments of these multi-chain chimeric polypeptides, the soluble tissue factor domain can be any of the exemplary soluble tissue factor domains described herein. In some embodiments of these multi-chain chimeric polypeptides, the pair of affinity domains can be any of the exemplary pairs of affinity domains described herein.

[0918] In some embodiments of these multi-chain chimeric polypeptides, the first target-binding domain binds specifically to TGF-β, and the second target-binding domain binds specifically to TGF-β or CD16. In some embodiments of these multi-chain chimeric polypeptides, the first target-binding domain is a soluble TGF-β receptor (e.g., a soluble TGFβRII receptor, e.g., a soluble human TGFβRII receptor). In some embodiments of these multi-chain chimeric polypeptides, the soluble human TGFRβRII includes a first sequence of soluble human TGFRβRII and a second sequence of soluble human TGFRβRII. In some embodiments of these multi-chain chimeric polypeptides, the soluble human TGFRβRII includes a linker disposed between the first sequence of soluble human TGFRβRII and the second sequence of soluble human TGFRβRII. In some examples of these multi-chain chimeric polypeptides, the linker includes the sequence GGGGSGGGGSGGGGS (SEQ ID NO: 102).

[0919] In some embodiments of these multi-chain chimeric polypeptides, the first sequence of soluble human TGFRβRII receptor comprises a sequence that is at least 80% identical (e.g., at least 82% identical, at least 84% identical, at least 86% identical, at least 88% identical, at least 90% identical, at least 92% identical, at least 94% identical, at least 96% identical, at least 98% identical, at least 99% identical, or 100% identical) to:

(SEQ ID NO: 183)
IPPHVQKSVNNDMIVTDNNGAVKFPQLCKFCDVRFSTCDNQKSCMSNCSIT
SICEKPQEVCVAVWRKNDENITLETVCHDPKLPYHDFILEDAASPKCIMKE
KKKPGETFFMCSCSSDECNDNIIFSEEYNTSNPD.

[0920] In some embodiments of these multi-chain chimeric polypeptides, the second sequence of soluble human TGFRβRII receptor comprises a sequence that is at least 80% identical (e.g., at least 82% identical, at least 84% identical, at least 86% identical, at least 88% identical, at least 90% identical, at least 92% identical, at least 94% identical, at least 96% identical, at least 98% identical, at least 99% identical, or 100% identical) to:

(SEQ ID NO: 184)
IPPHVQKSVNNDMIVTDNNGAVKFPQLCKFCDVRFSTCDNQKSCMSNCSIT
SICEKPQEVCVAVWRKNDENITLETVCHDPKLPYHDFILEDAASPKCIMKE
KKKPGETFFMCSCSSDECNDNIIFSEEYNTSNPD.

[0921] In some embodiments of these multi-chain chimeric polypeptides, the first sequence of soluble human TGFRβRII receptor is encoded by a sequence that is at least 80% identical (e.g., at least 82% identical, at least 84% identical, at least 86% identical, at least 88% identical, at least 90% identical, at least 92% identical, at least 94% identical, at least 96% identical, at least 98% identical, at least 99% identical, or 100% identical) to:

(SEQ ID NO: 185)
ATCCCCCCCCATGTGCAAAAGAGCGTGAACAACGATATGATCGTGACCGA
CAACAACGGCGCCGTGAAGTTTCCCCAGCTCTGCAAGTTCTGCGATGTCA
GGTTCAGCACCTGCGATAATCAGAAGTCCTGCATGTCCAACTGCAGCATC
ACCTCCATCTGCGAGAAGCCCCAAGAAGTGTGCGTGGCCGTGTGGCGGAA
AAATGACGAGAACATCACCCTGGAGACCGTGTGTCACGACCCCAAGCTCC
CTTATCACGACTTCATTCTGGAGGACGCTGCCTCCCCCAAATGCATCATG
AAGGAGAAGAAGAAGCCCGGAGAGACCTTCTTTATGTGTTCCTGTAGCAG
CGACGAGTGTAACGACAACATCATCTTCAGCGAAGAGTACAACACCAGCA
ACCCTGAT.

[0922] In some embodiments of these multi-chain chimeric polypeptides, the second sequence of soluble human TGFRβRII receptor is encoded by a sequence that is at least 80% identical (e.g., at least 82% identical, at least 84% identical, at least 86% identical, at least 88% identical, at least 90% identical, at least 92% identical, at least 94% identical, at least 96% identical, at least 98% identical, at least 99% identical, or 100% identical) to:

(SEQ ID NO: 186)
ATTCCTCCCCACGTGCAGAAGAGCGTGAATAATGACATGATCGTGACCGA
TAACAATGGCGCCGTGAAATTTCCCCAGCTGTGCAAATTCTGCGATGTGA
GGTTTTCCACCTGCGACAACCAGAAGTCCTGTATGAGCAACTGCTCCATC
ACCTCCATCTGTGAGAAGCCTCAGGAGGTGTGCGTGGCTGTCTGGCGGAA
GAATGACGAGAATATCACCCTGGAAACCGTCTGCCACGATCCCAAGCTGC
CCTACCACGATTTCATCCTGGAAGACGCCGCCAGCCCTAAGTGCATCATG
AAAGAGAAAAAGAAGCCTGGCGAGACCTTTTTCATGTGCTCCTGCAGCAG
CGACGAATGCAACGACAATATCATCTTTAGCGAGGAATACAATACCAGCA
ACCCCGAC.

[0923] In some embodiments of these multi-chain chimeric polypeptides, the soluble TGF-β receptor includes a sequence that is at least 80% identical (e.g., at least 82% identical, at least 84% identical, at least 86% identical, at least 88% identical, at least 90% identical, at least 92% identical, at least 94% identical, at least 96% identical, at least 98% identical, at least 99% identical, or 100% identical) to:

(SEQ ID NO: 188)
IPPHVQKSVNNDMIVTDNNGAVKFPQLCKFCDVRFSTCDNQKSCMSNCSIT
SICEKPQEVCVAVWRKNDENITLETVCHDPKLPYHDFILEDAASPKCIMKE
KKKPGETFFMCSCSSDECNDNIIFSEEYNTSNPDGGGGSGGGGSGGGGSIP
PHVQKSVNNDMIVTDNNGAVKFPQLCKFCDVRFSTCDNQKSCMSNCSITSI
CEKPQEVCVAVWRKNDENITLETVCHDPKLPYHDFILEDAASPKCIMKEKK
KPGETFFMCSCSSDECNDNIIFSEEYNTSNPD.

[0924] In some embodiments of these multi-chain chimeric polypeptides, the soluble TGF-β receptor is encoded by a sequence that is at least 80% identical (e.g., at least 82% identical, at least 84% identical, at least 86% identical, at least 88% identical, at least 90% identical, at least 92% identical, at least 94% identical, at least 96% identical, at least 98% identical, at least 99% identical, or 100% identical) to:

(SEQ ID NO: 187)
ATCCCCCCCCATGTGCAAAAGAGCGTGAACAACGATATGATCGTGACCGAC
AACAACGGCGCCGTGAAGTTTCCCCAGCTCTGCAAGTTCTGCGATGTCAGG
TTCAGCACCTGCGATAATCAGAAGTCCTGCATGTCCAACTGCAGCATCACC
TCCATCTGCGAGAAGCCCCAAGAAGTGTGCGTGGCCGTGTGGCGGAAAAAT
GACGAGAACATCACCCTGGAGACCGTGTGTCACGACCCCAAGCTCCCTTAT
CACGACTTCATTCTGGAGGACGCTGCCTCCCCCAAATGCATCATGAAGGAG
AAGAAGAAGCCCGGAGAGACCTTCTTTATGTGTTCCTGTAGCAGCGACGAG
TGTAACGACAACATCATCTTCAGCGAAGAGTACAACACCAGCAACCCTGAT
GGAGGTGGCGGATCCGGAGGTGGAGGTTCTGGTGGAGGTGGGAGTATTCCT
CCCCACGTGCAGAAGAGCGTGAATAATGACATGATCGTGACCGATAACAAT
GGCGCCGTGAAATTTCCCCAGCTGTGCAAATTCTGCGATGTGAGGTTTTCC
ACCTGCGACAACCAGAAGTCCTGTATGAGCAACTGCTCCATCACCTCCATC
TGTGAGAAGCCTCAGGAGGTGTGCGTGGCTGTCTGGCGGAAGAATGACGAG
AATATCACCCTGGAAACCGTCTGCCACGATCCCAAGCTGCCCTACCACGAT
TTCATCCTGGAAGACGCCGCCAGCCCTAAGTGCATCATGAAAGAGAAAAAG
AAGCCTGGCGAGACCTTTTTCATGTGCTCCTGCAGCAGCGACGAATGCAAC
GACAATATCATCTTTAGCGAGGAATACAATACCAGCAACCCCGAC.

[0925] In some embodiments of these multi-chain chimeric polypeptides, the second target-binding domain binds specifically to CD16. In some embodiments of these multi-chain chimeric polypeptides, the second target-binding domain includes an anti-CD16 scFv. In some embodiments of these multi-chain chimeric polypeptides, the scFv that binds specifically to CD16 includes a light chain variable domain that includes a sequence that is at least 80% identical (e.g., at least 82% identical, at least 84% identical, at least 86% identical, at least 88% identical, at least 90% identical, at least 92% identical, at least 94% identical, at least 96% identical, at least 98% identical, at least 99% identical, or 100% identical) to:

(SEQ ID NO: 215)
SELTQDPAVSVALGQTVRITCQGDSLRSYYASWYQQKPGQAPVLVIYGKNN
RPSGIPDRFSGSSSGNTASLTITGAQAEDEADYYCNSRDSSGNHVVFGGGT
KLTVGH.

[0926] In some embodiments of these multi-chain chimeric polypeptides, the scFv that binds specifically to CD16 is encoded by a light chain variable domain sequence that is at least 80% identical (e.g., at least 82% identical, at least 84% identical, at least 86% identical, at least 88% identical, at least 90% identical, at least 92% identical, at least 94% identical, at least 96% identical, at least 98% identical, at least 99% identical, or 100% identical) to:

(SEQ ID NO: 216)
TCCGAGCTGACCCAGGACCCTGCTGTGTCCGTGGCTCTGGGCCAGACCGTG
AGGATCACCTGCCAGGGCGACTCCCTGAGGTCCTACTACGCCTCCTGGTAC
CAGCAGAAGCCCGGCCAGGCTCCTGTGCTGGTGATCTACGGCAAGAACAAC
AGGCCCTCCGGCATCCCTGACAGGTTCTCCGGATCCTCCTCCGGCAACACC
GCCTCCCTGACCATCACAGGCGCTCAGGCCGAGGACGAGGCTGACTACTAC
TGCAACTCCAGGGACTCCTCCGGCAACCATGTGGTGTTCGGCGGCGGCACC
AAGCTGACCGTGGGCCAT.

[0927] In some embodiments of these multi-chain chimeric polypeptides, the scFv that binds specifically to CD16 includes a heavy chain variable domain that includes a sequence that is at least 80% identical (e.g., at least 82% identical, at least 84% identical, at least 86% identical, at least 88% identical, at least 90% identical, at least 92% identical, at least 94% identical, at least 96% identical, at least 98% identical, at least 99% identical, or 100% identical) to:

(SEQ ID NO: 217)
EVQLVESGGGVVRPGGSLRLSCAASGFTFDDYGMSWVRQAPGKGLEWVSGI
NWNGGSTGYADSVKGRFTISRDNAKNSLYLQMNSLRAEDTAVYYCARGRSL
LFDYWGQGTLVTVSR.

[0928] In some embodiments of these multi-chain chimeric polypeptides, the scFv that binds specifically to CD16 is encoded by a heavy chain variable domain sequence that is at least 80% identical (e.g., at least 82% identical, at least 84% identical, at least 86% identical, at least 88% identical, at least 90% identical, at least 92% identical, at least 94% identical, at least 96% identical, at least 98% identical, at least 99% identical, or 100% identical) to:

(SEQ ID NO: 218)
GAGGTGCAGCTGGTGGAGTCCGGAGGAGGAGTGGTGAGGCCTGGAGGCTCC
CTGAGGCTGAGCTGTGCTGCCTCCGGCTTCACCTTCGACGACTACGGCATG
TCCTGGGTGAGGCAGGCTCCTGGAAAGGGCCTGGAGTGGGTGTCCGGCATC
AACTGGAACGGCGGATCCACCGGCTACGCCGATTCCGTGAAGGGCAGGTTC
ACCATCAGCAGGGACAACGCCAAGAACTCCCTGTACCTGCAGATGAACTCC
CTGAGGGCCGAGGACACCGCCGTGTACTACTGCGCCAGGGGCAGGTCCCTG
CTGTTCGACTACTGGGGACAGGGCACCCTGGTGACCGTGTCCAGG.

[0929] In some embodiments, the first chimeric polypeptide can include a sequence that is at least 80% identical (e.g., at least 82% identical, at least 84% identical, at least 86% identical, at least 88% identical, at least 90% identical, at least 92% identical, at least 94% identical, at least 96% identical, at least 98% identical, at least 99% identical, or 100% identical) to:

(SEQ ID NO: 236)
IPPHVQKSVNNDMIVTDNNGAVKFPQLCKFCDVRFSTCDNQKSCMSNCSIT
SICEKPQEVCVAVWRKNDENITLETVCHDPKLPYHDFILEDAASPKCIMKE
KKKPGETFFMCSCSSDECNDNIIFSEEYNTSNPDGGGGSGGGGSGGGGSIP
PHVQKSVNNDMIVTDNNGAVKFPQLCKFCDVRFSTCDNQKSCMSNCSITSI
CEKPQEVCVAVWRKNDENITLETVCHDPKLPYHDFILEDAASPKCIMKEKK
KPGETFFMCSCSSDECNDNIIFSEEYNTSNPDSGTTNTVAAYNLTWKSTNF
KTILEWEPKPVNQVYTVQISTKSGDWKSKCFYTTDTECDLTDEIVKDVKQT
YLARVFSYPAGNVESTGSAGEPLYENSPEFTPYLETNLGQPTIQSFEQVGT
KVNVTVEDERTLVRRNNTFLSLRDVFGKDLIYTLYYWKSSSSGKKTAKTNT
NEFLIDVDKGENYCFSVQAVIPSRTVNRKSTDSPVECMGQEKGEFRENWVN
VISDLKKIEDLIQSMHIDATLYTESDVHPSCKVTAMKCFLLELQVISLESG
DASIHDTVENLIILANNSLSSNGNVTESGCKECEELEEKNIKEFLQSFVHI
VQMFINTS.

[0930] In some embodiments, a first chimeric polypeptide is encoded by a sequence that is at least 80% identical (e.g., at least 82% identical, at least 84% identical, at least 86% identical, at least 88% identical, at least 90% identical, at least 92% identical, at least 94% identical, at least 96% identical, at least 98% identical, at least 99% identical, or 100% identical) to:

(SEQ ID NO: 237)
ATCCCCCCCCATGTGCAAAAGAGCGTGAACAACGATATGATCGTGACCGAC
AACAACGGCGCCGTGAAGTTTCCCCAGCTCTGCAAGTTCTGCGATGTCAGG
TTCAGCACCTGCGATAATCAGAAGTCCTGCATGTCCAACTGCAGCATCACC
TCCATCTGCGAGAAGCCCCAAGAAGTGTGCGTGGCCGTGTGGCGGAAAAAT
GACGAGAACATCACCCTGGAGACCGTGTGTCACGACCCCAAGCTCCCTTAT
CACGACTTCATTCTGGAGGACGCTGCCTCCCCCAAATGCATCATGAAGGAG
AAGAAGAAGCCCGGAGAGACCTTCTTTATGTGTTCCTGTAGCAGCGACGAG
TGTAACGACAACATCATCTTCAGCGAAGAGTACAACACCAGCAACCCTGAT
GGAGGTGGCGGATCCGGAGGTGGAGGTTCTGGTGGAGGTGGGAGTATTCCT
CCCCACGTGCAGAAGAGCGTGAATAATGACATGATCGTGACCGATAACAAT
GGCGCCGTGAAATTTCCCCAGCTGTGCAAATTCTGCGATGTGAGGTTTTCC
ACCTGCGACAACCAGAAGTCCTGTATGAGCAACTGCTCCATCACCTCCATC
TGTGAGAAGCCTCAGGAGGTGTGCGTGGCTGTCTGGCGGAAGAATGACGAG
AATATCACCCTGGAAACCGTCTGCCACGATCCCAAGCTGCCCTACCACGAT
TTCATCCTGGAAGACGCCGCCAGCCCTAAGTGCATCATGAAAGAGAAAAAG
AAGCCTGGCGAGACCTTTTTCATGTGCTCCTGCAGCAGCGACGAATGCAAC
GACAATATCATCTTTAGCGAGGAATACAATACCAGCAACCCCGACAGCGGC
ACAACCAACACAGTCGCTGCCTATAACCTCACTTGGAAGAGCACCAACTTC
AAAACCATCCTCGAATGGGAACCCAAACCCGTTAACCAAGTTTACACCGTG
CAGATCAGCACCAAGTCCGGCGACTGGAAGTCCAAATGTTTCTATACCACC
GACACCGAGTGCGATCTCACCGATGAGATCGTGAAAGATGTGAAACAGACC
TACCTCGCCCGGGTGTTTAGCTACCCCGCCGGCAATGTGGAGAGCACTGGT
TCCGCTGGCGAGCCTTTATACGAGAACAGCCCCGAATTTACCCCTTACCTC
GAGACCAATTTAGGACAGCCCACCATCCAAAGCTTTGAGCAAGTTGGCACA
AAGGTGAATGTGACAGTGGAGGACGAGCGGACTTTAGTGCGGCGGAACAAC
ACCTTTCTCAGCCTCCGGGATGTGTTCGGCAAAGATTTAATCTACACACTG
TATTACTGGAAGTCCTCTTCCTCCGGCAAGAAGACAGCTAAAACCAACACA
AACGAGTTTTTAATCGACGTGGATAAAGGCGAAAACTACTGTTTCAGCGTG
CAAGCTGTGATCCCCTCCCGGACCGTGAATAGGAAAAGCACCGATAGCCCC
GTTGAGTGCATGGGCCAAGAAAAGGGCGAGTTCCGGGAGAACTGGGTGAAC
GTCATCAGCGATTTAAAGAAGATCGAAGATTTAATTCAGTCCATGCATATC
GACGCCACTTTATACACAGAATCCGACGTGCACCCCTCTTGTAAGGTGACC
GCCATGAAATGTTTTTTACTGGAGCTGCAAGTTATCTCTTTAGAGAGCGGA
GACGCTAGCATCCACGACACCGTGGAGAATTTAATCATTTTAGCCAATAAC
TCTTTATCCAGCAACGGCAACGTGACAGAGTCCGGCTGCAAGGAGTGCGAA
GAGCTGGAGGAGAAGAACATCAAGGAGTTTCTGCAATCCTTTGTGCACATT
GTCCAGATGTTCATCAATACCTCC.

[0931] In some embodiments, a first chimeric polypeptide can include a sequence that is at least 80% identical (e.g., at least 82% identical, at least 84% identical, at least 86% identical, at least 88% identical, at least 90% identical, at least 92% identical, at least 94% identical, at least 96% identical, at least 98% identical, at least 99% identical, or 100% identical) to:

(SEQ ID NO: 238)
MKWVTFISLLFLFSSAYSIPPHVQKSVNNDMIVTDNNGAVKFPQLCKFCDV
RFSTCDNQKSCMSNCSITSICEKPQEVCVAVWRKNDENITLETVCHDPKLP
YHDFILEDAASPKCIMKEKKKPGETFFMCSCSSDECNDNIIFSEEYNTSNP
DGGGGSGGGGSGGGGSIPPHVQKSVNNDMIVTDNNGAVKFPQLCKFCDVRF
STCDNQKSCMSNCSITSICEKPQEVCVAVWRKNDENITLETVCHDPKLPYH
DFILEDAASPKCIMKEKKKPGETFFMCSCSSDECNDNIIFSEEYNTSNPDS
GTTNTVAAYNLTWKSTNFKTILEWEPKPVNQVYTVQISTKSGDWKSKCFYT
TDTECDLTDEIVKDVKQTYLARVFSYPAGNVESTGSAGEPLYENSPEFTPY
LETNLGQPTIQSFEQVGTKVNVTVEDERTLVRRNNTFLSLRDVFGKDLIYT
LYYWKSSSSGKKTAKTNTNEFLIDVDKGENYCFSVQAVIPSRTVNRKSTDS
PVECMGQEKGEFRENWVNVISDLKKIEDLIQSMHIDATLYTESDVHPSCKV
TAMKCFLLELQVISLESGDASIHDTVENLIILANNSLSSNGNVTESGCKEC
EELEEKNIKEFLQSFVHIVQMFINTS.

[0932] In some embodiments, a first chimeric polypeptide is encoded by a sequence that is at least 80% identical (e.g., at least 82% identical, at least 84% identical, at least 86% identical, at least 88% identical, at least 90% identical, at least 92% identical, at least 94% identical, at least 96% identical, at least 98% identical, at least 99% identical, or 100% identical) to:

(SEQ ID NO: 239)
ATGAAGTGGGTGACCTTCATCAGCCTGCTGTTCCTGTTCTCCAGCGCCTAC
TCCATCCCCCCCCATGTGCAAAAGAGCGTGAACAACGATATGATCGTGACC
GACAACAACGGCGCCGTGAAGTTTCCCCAGCTCTGCAAGTTCTGCGATGTC
AGGTTCAGCACCTGCGATAATCAGAAGTCCTGCATGTCCAACTGCAGCATC
ACCTCCATCTGCGAGAAGCCCCAAGAAGTGTGCGTGGCCGTGTGGCGGAAA
AATGACGAGAACATCACCCTGGAGACCGTGTGTCACGACCCCAAGCTCCCT
TATCACGACTTCATTCTGGAGGACGCTGCCTCCCCCAAATGCATCATGAAG
GAGAAGAAGAAGCCCGGAGAGACCTTCTTTATGTGTTCCTGTAGCAGCGAC
GAGTGTAACGACAACATCATCTTCAGCGAAGAGTACAACACCAGCAACCCT
GATGGAGGTGGCGGATCCGGAGGTGGAGGTTCTGGTGGAGGTGGGAGTATT
CCTCCCCACGTGCAGAAGAGCGTGAATAATGACATGATCGTGACCGATAAC
AATGGCGCCGTGAAATTTCCCCAGCTGTGCAAATTCTGCGATGTGAGGTTT
TCCACCTGCGACAACCAGAAGTCCTGTATGAGCAACTGCTCCATCACCTCC
ATCTGTGAGAAGCCTCAGGAGGTGTGCGTGGCTGTCTGGCGGAAGAATGAC
GAGAATATCACCCTGGAAACCGTCTGCCACGATCCCAAGCTGCCCTACCAC
GATTTCATCCTGGAAGACGCCGCCAGCCCTAAGTGCATCATGAAAGAGAAA
AAGAAGCCTGGCGAGACCTTTTTCATGTGCTCCTGCAGCAGCGACGAATGC
AACGACAATATCATCTTTAGCGAGGAATACAATACCAGCAACCCCGACAGC
GGCACAACCAACACAGTCGCTGCCTATAACCTCACTTGGAAGAGCACCAAC
TTCAAAACCATCCTCGAATGGGAACCCAAACCCGTTAACCAAGTTTACACC
GTGCAGATCAGCACCAAGTCCGGCGACTGGAAGTCCAAATGTTTCTATACC
ACCGACACCGAGTGCGATCTCACCGATGAGATCGTGAAAGATGTGAAACAG
ACCTACCTCGCCCGGGTGTTTAGCTACCCCGCCGGCAATGTGGAGAGCACT
GGTTCCGCTGGCGAGCCTTTATACGAGAACAGCCCCGAATTTACCCCTTAC
CTCGAGACCAATTTAGGACAGCCCACCATCCAAAGCTTTGAGCAAGTTGGC
ACAAAGGTGAATGTGACAGTGGAGGACGAGCGGACTTTAGTGCGGCGGAAC
AACACCTTTCTCAGCCTCCGGGATGTGTTCGGCAAAGATTTAATCTACACA
CTGTATTACTGGAAGTCCTCTTCCTCCGGCAAGAAGACAGCTAAAACCAAC
ACAAACGAGTTTTTAATCGACGTGGATAAAGGCGAAAACTACTGTTTCAGC
GTGCAAGCTGTGATCCCCTCCCGGACCGTGAATAGGAAAAGCACCGATAGC
CCCGTTGAGTGCATGGGCCAAGAAAAGGGCGAGTTCCGGGAGAACTGGGTG
AACGTCATCAGCGATTTAAAGAAGATCGAAGATTTAATTCAGTCCATGCAT
ATCGACGCCACTTTATACACAGAATCCGACGTGCACCCCTCTTGTAAGGTG
ACCGCCATGAAATGTTTTTTACTGGAGCTGCAAGTTATCTCTTTAGAGAGC
GGAGACGCTAGCATCCACGACACCGTGGAGAATTTAATCATTTTAGCCAAT
AACTCTTTATCCAGCAACGGCAACGTGACAGAGTCCGGCTGCAAGGAGTGC
GAAGAGCTGGAGGAGAAGAACATCAAGGAGTTTCTGCAATCCTTTGTGCAC
ATTGTCCAGATGTTCATCAATACCTCC.

[0933] In some embodiments, the second chimeric polypeptide can include a sequence that is at least 80% identical (e.g., at least 82% identical, at least 84% identical, at least 86% identical, at least 88% identical, at least 90% identical, at least 92% identical, at least 94% identical, at least 96% identical, at least 98% identical, at least 99% identical, or 100% identical) to:

(SEQ ID NO: 308)
IPPHVQKSVNNDMIVTDNNGAVKFPQLCKFCDVRFSTCDNQKSCMSNCSIT
SICEKPQEVCVAVWRKNDENITLETVCHDPKLPYHDFILEDAASPKCIMKE
KKKPGETFFMCSCSSDECNDNIIFSEEYNTSNPDGGGGSGGGGSGGGGSIP
PHVQKSVNNDMIVTDNNGAVKFPQLCKFCDVRFSTCDNQKSCMSNCSITSI
CEKPQEVCVAVWRKNDENITLETVCHDPKLPYHDFILEDAASPKCIMKEKK
KPGETFFMCSCSSDECNDNIIFSEEYNTSNPDITCPPPMSVEHADIWVKSY
SLYSRERYICNSGFKRKAGTSSLTECVLNKATNVAHWTTPSLKCIRSELTQ
DPAVSVALGQTVRITCQGDSLRSYYASWYQQKPGQAPVLVIYGKNNRPSGI
PDRFSGSSSGNTASLTITGAQAEDEADYYCNSRDSSGNHVVFGGGTKLTVG
HGGGGSGGGGSGGGGSEVQLVESGGGVVRPGGSLRLSCAASGFTFDDYGMS
WVRQAPGKGLEWVSGINWNGGSTGYADSVKGRFTISRDNAKNSLYLQMNSL
RAEDTAVYYCARGRSLLFDYWGQGTLVTVSR.

[0934] In some embodiments, a second chimeric polypeptide is encoded by a sequence that is at least 80% identical (e.g., at least 82% identical, at least 84% identical, at least 86% identical, at least 88% identical, at least 90% identical, at least 92% identical, at least 94% identical, at least 96% identical, at least 98% identical, at least 99% identical, or 100% identical) to:

(SEQ ID NO: 309)
ATCCCCCCCCATGTGCAAAAGAGCGTGAACAACGATATGATCGTGACCGAC
AACAACGGCGCCGTGAAGTTTCCCCAGCTCTGCAAGTTCTGCGATGTCAGG
TTCAGCACCTGCGATAATCAGAAGTCCTGCATGTCCAACTGCAGCATCACC
TCCATCTGCGAGAAGCCCCAAGAAGTGTGCGTGGCCGTGTGGCGGAAAAAT
GACGAGAACATCACCCTGGAGACCGTGTGTCACGACCCCAAGCTCCCTTAT
CACGACTTCATTCTGGAGGACGCTGCCTCCCCCAAATGCATCATGAAGGAG
AAGAAGAAGCCCGGAGAGACCTTCTTTATGTGTTCCTGTAGCAGCGACGAG
TGTAACGACAACATCATCTTCAGCGAAGAGTACAACACCAGCAACCCTGAT
GGAGGTGGCGGATCCGGAGGTGGAGGTTCTGGTGGAGGTGGGAGTATTCCT
CCCCACGTGCAGAAGAGCGTGAATAATGACATGATCGTGACCGATAACAAT
GGCGCCGTGAAATTTCCCCAGCTGTGCAAATTCTGCGATGTGAGGTTTTCC
ACCTGCGACAACCAGAAGTCCTGTATGAGCAACTGCTCCATCACCTCCATC
TGTGAGAAGCCTCAGGAGGTGTGCGTGGCTGTCTGGCGGAAGAATGACGAG
AATATCACCCTGGAAACCGTCTGCCACGATCCCAAGCTGCCCTACCACGAT
TTCATCCTGGAAGACGCCGCCAGCCCTAAGTGCATCATGAAAGAGAAAAAG
AAGCCTGGCGAGACCTTTTTCATGTGCTCCTGCAGCAGCGACGAATGCAAC
GACAATATCATCTTTAGCGAGGAATACAATACCAGCAACCCCGACATTACA
TGCCCCCCTCCCATGAGCGTGGAGCACGCCGACATCTGGGTGAAGAGCTAT
AGCCTCTACAGCCGGGAGAGGTATATCTGTAACAGCGGCTTCAAGAGGAAG
GCCGGCACCAGCAGCCTCACCGAGTGCGTGCTGAATAAGGCTACCAACGTG
GCTCACTGGACAACACCCTCTTTAAAGTGCATCCGGTCCGAGCTGACCCAG
GACCCTGCTGTGTCCGTGGCTCTGGGCCAGACCGTGAGGATCACCTGCCAG
GGCGACTCCCTGAGGTCCTACTACGCCTCCTGGTACCAGCAGAAGCCCGGC
CAGGCTCCTGTGCTGGTGATCTACGGCAAGAACAACAGGCCCTCCGGCATC
CCTGACAGGTTCTCCGGATCCTCCTCCGGCAACACCGCCTCCCTGACCATC
ACAGGCGCTCAGGCCGAGGACGAGGCTGACTACTACTGCAACTCCAGGGAC
TCCTCCGGCAACCATGTGGTGTTCGGCGGCGGCACCAAGCTGACCGTGGGC
CATGGCGGCGGCGGCTCCGGAGGCGGCGGCAGCGGCGGAGGAGGATCCGAG
GTGCAGCTGGTGGAGTCCGGAGGAGGAGTGGTGAGGCCTGGAGGCTCCCTG
AGGCTGAGCTGTGCTGCCTCCGGCTTCACCTTCGACGACTACGGCATGTCC
TGGGTGAGGCAGGCTCCTGGAAAGGGCCTGGAGTGGGTGTCCGGCATCAAC
TGGAACGGCGGATCCACCGGCTACGCCGATTCCGTGAAGGGCAGGTTCACC
ATCAGCAGGGACAACGCCAAGAACTCCCTGTACCTGCAGATGAACTCCCTG
AGGGCCGAGGACACCGCCGTGTACTACTGCGCCAGGGGCAGGTCCCTGCTG
TTCGACTACTGGGGACAGGGCACCCTGGTGACCGTGTCCAGG.

[0935] In some embodiments, a second chimeric polypeptide can include a sequence that is at least 80% identical (e.g., at least 82% identical, at least 84% identical, at least 86% identical, at least 88% identical, at least 90% identical, at least 92% identical, at least 94% identical, at least 96% identical, at least 98% identical, at least 99% identical, or 100% identical) to:

(SEQ ID NO: 310)
MKWVTFISLLFLFSSAYSIPPHVQKSVNNDMIVTDNNGAVKFPQLCKFCDV
RFSTCDNQKSCMSNCSITSICEKPQEVCVAVWRKNDENITLETVCHDPKLP
YHDFILEDAASPKCIMKEKKKPGETFFMCSCSSDECNDNIIFSEEYNTSNP
DGGGGSGGGGSGGGGSIPPHVQKSVNNDMIVTDNNGAVKFPQLCKFCDVRF
STCDNQKSCMSNCSITSICEKPQEVCVAVWRKNDENITLETVCHDPKLPYH
DFILEDAASPKCIMKEKKKPGETFFMCSCSSDECNDNIIFSEEYNTSNPDI
TCPPPMSVEHADIWVKSYSLYSRERYICNSGFKRKAGTSSLTECVLNKATN
VAHWTTPSLKCIRSELTQDPAVSVALGQTVRITCQGDSLRSYYASWYQQKP
GQAPVLVIYGKNNRPSGIPDRFSGSSSGNTASLTITGAQAEDEADYYCNSR
DSSGNHVVFGGGTKLTVGHGGGGSGGGGSGGGGSEVQLVESGGGVVRPGGS
LRLSCAASGFTFDDYGMSWVRQAPGKGLEWVSGINWNGGSTGYADSVKGRF
TISRDNAKNSLYLQMNSLRAEDTAVYYCARGRSLLFDYWGQGTLVTVSR.

[0936] In some embodiments, a second chimeric polypeptide is encoded by a sequence that is at least 80% identical (e.g., at least 82% identical, at least 84% identical, at least 86% identical, at least 88% identical, at least 90% identical, at least 92% identical, at least 94% identical, at least 96% identical, at least 98% identical, at least 99% identical, or 100% identical) to:

(SEQ ID NO: 311)
ATGAAGTGGGTGACCTTCATCAGCCTGCTGTTCCTGTTCTCCAGCGCCTAC
TCCATCCCCCCCCATGTGCAAAAGAGCGTGAACAACGATATGATCGTGACC
GACAACAACGGCGCCGTGAAGTTTCCCCAGCTCTGCAAGTTCTGCGATGTC
AGGTTCAGCACCTGCGATAATCAGAAGTCCTGCATGTCCAACTGCAGCATC
ACCTCCATCTGCGAGAAGCCCCAAGAAGTGTGCGTGGCCGTGTGGCGGAAA
AATGACGAGAACATCACCCTGGAGACCGTGTGTCACGACCCCAAGCTCCCT
TATCACGACTTCATTCTGGAGGACGCTGCCTCCCCCAAATGCATCATGAAG
GAGAAGAAGAAGCCCGGAGAGACCTTCTTTATGTGTTCCTGTAGCAGCGAC
GAGTGTAACGACAACATCATCTTCAGCGAAGAGTACAACACCAGCAACCCT
GATGGAGGTGGCGGATCCGGAGGTGGAGGTTCTGGTGGAGGTGGGAGTATT
CCTCCCCACGTGCAGAAGAGCGTGAATAATGACATGATCGTGACCGATAAC
AATGGCGCCGTGAAATTTCCCCAGCTGTGCAAATTCTGCGATGTGAGGTTT
TCCACCTGCGACAACCAGAAGTCCTGTATGAGCAACTGCTCCATCACCTCC
ATCTGTGAGAAGCCTCAGGAGGTGTGCGTGGCTGTCTGGCGGAAGAATGAC
GAGAATATCACCCTGGAAACCGTCTGCCACGATCCCAAGCTGCCCTACCAC
GATTTCATCCTGGAAGACGCCGCCAGCCCTAAGTGCATCATGAAAGAGAAA
AAGAAGCCTGGCGAGACCTTTTTCATGTGCTCCTGCAGCAGCGACGAATGC
AACGACAATATCATCTTTAGCGAGGAATACAATACCAGCAACCCCGACATT
ACATGCCCCCCTCCCATGAGCGTGGAGCACGCCGACATCTGGGTGAAGAGC
TATAGCCTCTACAGCCGGGAGAGGTATATCTGTAACAGCGGCTTCAAGAGG
AAGGCCGGCACCAGCAGCCTCACCGAGTGCGTGCTGAATAAGGCTACCAAC
GTGGCTCACTGGACAACACCCTCTTTAAAGTGCATCCGGTCCGAGCTGACC
CAGGACCCTGCTGTGTCCGTGGCTCTGGGCCAGACCGTGAGGATCACCTGC
CAGGGCGACTCCCTGAGGTCCTACTACGCCTCCTGGTACCAGCAGAAGCCC
GGCCAGGCTCCTGTGCTGGTGATCTACGGCAAGAACAACAGGCCCTCCGGC
ATCCCTGACAGGTTCTCCGGATCCTCCTCCGGCAACACCGCCTCCCTGACC
ATCACAGGCGCTCAGGCCGAGGACGAGGCTGACTACTACTGCAACTCCAGG
GACTCCTCCGGCAACCATGTGGTGTTCGGCGGCGGCACCAAGCTGACCGTG
GGCCATGGCGGCGGCGGCTCCGGAGGCGGCGGCAGCGGCGGAGGAGGATCC
GAGGTGCAGCTGGTGGAGTCCGGAGGAGGAGTGGTGAGGCCTGGAGGCTCC
CTGAGGCTGAGCTGTGCTGCCTCCGGCTTCACCTTCGACGACTACGGCATG
TCCTGGGTGAGGCAGGCTCCTGGAAAGGGCCTGGAGTGGGTGTCCGGCATC
AACTGGAACGGCGGATCCACCGGCTACGCCGATTCCGTGAAGGGCAGGTTC
ACCATCAGCAGGGACAACGCCAAGAACTCCCTGTACCTGCAGATGAACTCC
CTGAGGGCCGAGGACACCGCCGTGTACTACTGCGCCAGGGGCAGGTCCCTG
CTGTTCGACTACTGGGGACAGGGCACCCTGGTGACCGTGTCCAGG.

### Exemplary Multi-Chain Chimeric Polypeptides—Type 0

[0937] In some embodiments of any of the multi-chain chimeric polypeptides described herein, the first target-binding domain and the second targeting-binding domain each independently bind specifically to TGF-β or a receptor of CD137L. In some embodiments of these multi-chain chimeric polypeptides described herein, the second chimeric polypeptide further includes the additional target-binding domain. In some embodiments of these multi-chain chimeric polypeptides described herein, the additional target-binding domain binds specifically to a receptor to TGF-β (e.g., a soluble TGF-β receptor, e.g., a soluble TGFβRII receptor) or CD137L.

[0938] In some examples of these multi-chain chimeric polypeptides, the first target-binding domain and the soluble tissue factor domain directly abut each other in the first chimeric polypeptide. In some examples of these multi-chain chimeric polypeptides, the first chimeric polypeptide further comprises a linker sequence (e.g., any of the exemplary linkers described herein) between the first target-binding domain and the soluble tissue factor domain in the first chimeric polypeptide.

[0939] In some embodiments of these multi-chain chimeric polypeptides, the soluble tissue factor domain and the first domain of the pair of affinity domains directly abut each other in the first chimeric polypeptide. In some embodiments of these multi-chain chimeric polypeptides, the first chimeric polypeptide further includes a linker sequence (e.g., any of the exemplary linkers described herein) between the soluble tissue factor domain and the first domain of the pair of affinity domains in the first chimeric polypeptide.

[0940] In some embodiments of these multi-chain chimeric polypeptides, the second domain of the pair of affinity domains and the second target-binding domain directly abut each other in the second chimeric polypeptide. In some embodiments of these multi-chain chimeric polypeptides, the second chimeric polypeptide further includes a linker sequence (e.g., any of the exemplary linkers described herein) between the second domain of the pair of affinity domains and the second target-binding domain in the second chimeric polypeptide.

[0941] In some embodiments, the second chimeric polypeptide further comprises one or more additional target-binding domains at the N-terminal end or the C-terminal end of the second chimeric polypeptide.

[0942] In some embodiments of these multi-chain chimeric polypeptides, the additional target-binding domain and the second domain of the pair of affinity domains directly abut each other in the second chimeric polypeptide. In some embodiments of these multi-chain chimeric polypeptides, the second chimeric polypeptide further includes a linker sequence (e.g., any of the exemplary linkers described herein) between the second domain of the pair of affinity domains and the additional target-binding domain in the second chimeric polypeptide.

[0943] In some embodiments of these multi-chain chimeric polypeptides, the additional target-binding domain and the second target-binding domain directly abut each other in the second chimeric polypeptide. In some embodiments of these multi-chain chimeric polypeptides, the second chimeric polypeptide further includes a linker sequence (e.g., any of the exemplary linkers described herein) between the second target-binding domain and the additional target-binding domain in the second chimeric polypeptide.

[0944] In some embodiments of these multi-chain chimeric polypeptides, the soluble tissue factor domain can be any of the exemplary soluble tissue factor domains described herein. In some embodiments of these multi-chain chimeric polypeptides, the pair of affinity domains can be any of the exemplary pairs of affinity domains described herein.

[0945] In some embodiments of these multi-chain chimeric polypeptides, the first target-binding domain binds specifically to TGF-β, and the second target-binding domain binds specifically to CD137L. In some embodiments of these multi-chain chimeric polypeptides, the first target-binding domain or the additional target-binding domain is a soluble TGF-β receptor (e.g., a soluble TGFβRII receptor, e.g., a soluble human TGFβRII receptor).

[0946] In some embodiments of these multi-chain chimeric polypeptides, the soluble human TGFRβRII includes a first sequence of soluble human TGFRβRII and a second sequence of soluble human TGFRβRII. In some embodiments of these multi-chain chimeric polypeptides, the soluble human TGFRβRII includes a linker disposed between the first sequence of soluble human TGFRβRII and the second sequence of soluble human TGFRβRII. In some examples of these multi-chain chimeric polypeptides, the linker includes the sequence GGGGSGGGGSGGGGS (SEQ ID NO: 102).

[0947] In some embodiments of these multi-chain chimeric polypeptides, the first sequence of soluble human TGFRβRII receptor comprises a sequence that is at least 80% identical (e.g., at least 82% identical, at least 84% identical, at least 86% identical, at least 88% identical, at least 90% identical, at least 92% identical, at least 94% identical, at least 96% identical, at least 98% identical, at least 99% identical, or 100% identical) to:

(SEQ ID NO: 183)
IPPHVQKSVNNDMIVTDNNGAVKFPQLCKFCDVRFSTCDNQKSCMNCSITS
ICEKPQEVCVAVWRKNDENITLETVCHDPKLPYHDFILEDAASPKCIMKEK
KKPGETFFMCSCSSDECNDNIIFSEEYNTSNPD.

[0948] In some embodiments of these multi-chain chimeric polypeptides, the second sequence of soluble human TGFRβRII receptor comprises a sequence that is at least 80% identical (e.g., at least 82% identical, at least 84% identical, at least 86% identical, at least 88% identical, at least 90% identical, at least 92% identical, at least 94% identical, at least 96% identical, at least 98% identical, at least 99% identical, or 100% identical) to:

(SEQ ID NO: 184)
IPPHVQKSVNNDMIVTDNNGAVKFPQLCKFCDVRFSTCDNQKSCMSNCSIT
SCEKPQEVCVAVWRKNDENITLETVCHDPKLPYHDFILEDAASPKCIMKEK
KKPGETFFMCSCSSDECNDNIIFSEEYNTSNPD.

[0949] In some embodiments of these multi-chain chimeric polypeptides, the first sequence of soluble human TGFRβRII receptor is encoded by a sequence that is at least 80% identical (e.g., at least 82% identical, at least 84% identical, at least 86% identical, at least 88% identical, at least 90% identical, at least 92% identical, at least 94% identical, at least 96% identical, at least 98% identical, at least 99% identical, or 100% identical) to:

(SEQ ID NO: 185)
ATCCCCCCCCATGTGCAAAAGAGCGTGAACAACGATATGATCGTGACCGA
CAACAACGGCGCCGTGAAGTTTCCCCAGCTCTGCAAGTTCTGCGATGTCA
GGTTCAGCACCTGCGATAATCAGAAGTCCTGCATGTCCAACTGCAGCATC
ACCTCCATCTGCGAGAAGCCCCAAGAAGTGTGCGTGGCCGTGTGGCGGAA
AAATGACGAGAACATCACCCTGGAGACCGTGTGTCACGACCCCAAGCTCC
CTTATCACGACTTCATTCTGGAGGACGCTGCCTCCCCCAAATGCATCATG
AAGGAGAAGAAGAAGCCCGGAGAGACCTTCTTTATGTGTTCCTGTAGCAG
CGACGAGTGTAACGACAACATCATCTTCAGCGAAGAGTACAACACCAGCA
ACCCTGAT.

[0950] In some embodiments of these multi-chain chimeric polypeptides, the second sequence of soluble human TGFRβRII receptor is encoded by a sequence that is at least 80% identical (e.g., at least 82% identical, at least 84% identical, at least 86% identical, at least 88% identical, at least 90% identical, at least 92% identical, at least 94% identical, at least 96% identical, at least 98% identical, at least 99% identical, or 100% identical) to:

(SEQ ID NO: 186)
ATTCCTCCCCACGTGCAGAAGAGCGTGAATAATGACATGATCGTGACCGA
TAACAATGGCGCCGTGAAATTTCCCCAGCTGTGCAAATTCTGCGATGTGA
GGTTTTCCACCTGCGACAACCAGAAGTCCTGTATGAGCAACTGCTCCATC
ACCTCCATCTGTGAGAAGCCTCAGGAGGTGTGCGTGGCTGTCTGGCGGAA
GAATGACGAGAATATCACCCTGGAAACCGTCTGCCACGATCCCAAGCTGC
CCTACCACGATTTCATCCTGGAAGACGCCGCCAGCCCTAAGTGCATCATG
AAAGAGAAAAAGAAGCCTGGCGAGACCTTTTTCATGTGCTCCTGCAGCAG
CGACGAATGCAACGACAATATCATCTTTAGCGAGGAATACAATACCAGCA
ACCCCGAC.

[0951] In some embodiments of these multi-chain chimeric polypeptides, the soluble TGF-β receptor includes a sequence that is at least 80% identical (e.g., at least 82% identical, at least 84% identical, at least 86% identical, at least 88% identical, at least 90% identical, at least 92% identical, at least 94% identical, at least 96% identical, at least 98% identical, at least 99% identical, or 100% identical) to:

(SEQ ID NO: 188)
IPPHVQKSVNNDMIVTDNNGAVKFPQLCKFCDVRFSTCDNQKSCMSNCSIT
SICEKPQEVCVAVWRKNDENITLETVCHDPKLPYHDFILEDAASPKCIMKE
KKKPGETFFMCSCSSDECNDNIIFSEEYNTSNPDGGGGSGGGGSGGGGSIP
PHVQKSVNNDMIVTDNNGAVKFPQLCKFCDVRFSTCDNQKSCMSNCSITSI
CEKPQEVCVAVWRKNDENITLETVCHDPKLPYHDFILEDAASPKCIMKEKK
KPGETFFMCSCSSDECNDNIIFSEEYNTSNPD.

[0952] In some embodiments of these multi-chain chimeric polypeptides, the soluble TGF-β receptor is encoded by a sequence that is at least 80% identical (e.g., at least 82% identical, at least 84% identical, at least 86% identical, at least 88% identical, at least 90% identical, at least 92% identical, at least 94% identical, at least 96% identical, at least 98% identical, at least 99% identical, or 100% identical) to:

(SEQ ID NO: 187)
ATCCCCCCCCATGTGCAAAAGAGCGTGAACAACGATATGATCGTGACCGA
CAACAACGGCGCCGTGAAGTTTCCCCAGCTCTGCAAGTTCTGCGATGTCA
GGTTCAGCACCTGCGATAATCAGAAGTCCTGCATGTCCAACTGCAGCATC
ACCTCCATCTGCGAGAAGCCCCAAGAAGTGTGCGTGGCCGTGTGGCGGAA
AAATGACGAGAACATCACCCTGGAGACCGTGTGTCACGACCCCAAGCTCC
CTTATCACGACTTCATTCTGGAGGACGCTGCCTCCCCCAAATGCATCATG
AAGGAGAAGAAGAAGCCCGGAGAGACCTTCTTTATGTGTTCCTGTAGCAG
CGACGAGTGTAACGACAACATCATCTTCAGCGAAGAGTACAACACCAGCA
ACCCTGATGGAGGTGGCGGATCCGGAGGTGGAGGTTCTGGTGGAGGTGGG
AGTATTCCTCCCCACGTGCAGAAGAGCGTGAATAATGACATGATCGTGAC
CGATAACAATGGCGCCGTGAAATTTCCCCAGCTGTGCAAATTCTGCGATG
TGAGGTTTTCCACCTGCGACAACCAGAAGTCCTGTATGAGCAACTGCTCC
ATCACCTCCATCTGTGAGAAGCCTCAGGAGGTGTGCGTGGCTGTCTGGCG
GAAGAATGACGAGAATATCACCCTGGAAACCGTCTGCCACGATCCCAAGC
TGCCCTACCACGATTTCATCCTGGAAGACGCCGCCAGCCCTAAGTGCATC
ATGAAAGAGAAAAAGAAGCCTGGCGAGACCTTTTTCATGTGCTCCTGCAG
CAGCGACGAATGCAACGACAATATCATCTTTAGCGAGGAATACAATACCA
GCAACCCCGAC.

[0953] In some embodiments of these multi-chain chimeric polypeptides, the second target-binding domain includes a soluble CD137L protein (e.g., a soluble human CD137L protein). In some embodiments of these multi-chain chimeric polypeptides, a soluble human CD137L includes a sequence that is at least 80% identical (e.g., at least 85%, at least 90%, at least 95%, at least 96%, at least 97%, at least 98%, at least 99%, or 100% identical) to:

(SEQ ID NO: 260)
REGPELSPDDPAGLLDLRQGMFAQLVAQNVLLIDGPLSWYSDPGLAGVSL
TGGLSYKEDTKELVVAKAGVYYVFFQLELRRVVAGEGSGSVSLALHLQPL
RSAAGAAALALTVDLPPASSEARNSAFGFQGRLLHLSAGQRLGVHLHTEA
RARHAWQLTQGATVLGLFRVTPEIPAGLPSPRSE.

[0954] In some embodiments of these multi-chain chimeric polypeptides, a soluble human CD137L is encoded by a sequence that is at least 80% identical (e.g., at least 85%, at least 90%, at least 95%, at least 96%, at least 97%, at least 98%, at least 99%, or 100% identical) to:

(SEQ ID NO: 261)
CGCGAGGGTCCCGAGCTTTCGCCCGACGATCCCGCCGGCCTCTTGGACCT
GCGGCAGGGCATGTTTGCGCAGCTGGTGGCCCAAAATGTTCTGCTGATCG
ATGGGCCCCTGAGCTGGTACAGTGACCCAGGCCTGGCAGGCGTGTCCCTG
ACGGGGGGCCTGAGCTACAAAGAGGACACGAAGGAGCTGGTGGTGGCCAA
GGCTGGAGTCTACTATGTCTTCTTTCAACTAGAGCTGCGGCGCGTGGTGG
CCGGCGAGGGCTCAGGCTCCGTTTCACTTGCGCTGCACCTGCAGCCACTG
CGCTCTGCTGCTGGGGCCGCCGCCCTGGCTTTGACCGTGGACCTGCCACC
CGCCTCCTCCGAGGCTCGGAACTCGGCCTTCGGTTTCCAGGGCCGCTTGC
TGCACCTGAGTGCCGGCCAGCGCCTGGGCGTCCATCTTCACACTGAGGCC
AGGGCACGCCATGCCTGGCAGCTTACCCAGGGCGCCACAGTCTTGGGACT
CTTCCGGGTGACCCCCGAAATCCCAGCCGGACTCCCTTCACCGAGGTCGG
AA.

[0955] In some embodiments of these multi-chain chimeric polypeptides, a soluble human CD137L includes a sequence that is at least 80% identical (e.g., at least 85%, at least 90%, at least 95%, at least 96%, at least 97%, at least 98%, at least 99%, or 100% identical) to:

(SEQ ID NO: 262)
DPAGLLDLRQGMFAQLVAQNVLLIDGPLSWYSDPGLAGVSLTGGLSYKED
TKELVVAKAGVYYVFFQLELRRVVAGEGSGSVSLALHLQPLRSAAGAAAL
ALTVDLPPASSEARNSAFGFQGRLLHLSAGQRLGVHLHTEARARHAWQLT
QGATVLGLFRVTPEI.

[0956] In some embodiments of these multi-chain chimeric polypeptides, a soluble human CD137L is encoded by a sequence that is at least 80% identical (e.g., at least 85%, at least 90%, at least 95%, at least 96%, at least 97%, at least 98%, at least 99%, or 100% identical) to:

(SEQ ID NO: 263)
GATCCCGCCGGCCTCTTGGACCTGCGGCAGGGCATGTTTGCGCAGCTGGT
GGCCCAAAATGTTCTGCTGATCGATGGGCCCCTGAGCTGGTACAGTGACC
CAGGCCTGGCAGGCGTGTCCCTGACGGGGGGCCTGAGCTACAAAGAGGAC
ACGAAGGAGCTGGTGGTGGCCAAGGCTGGAGTCTACTATGTCTTCTTTCA
ACTAGAGCTGCGGCGCGTGGTGGCCGGCGAGGGCTCAGGCTCCGTTTCAC
TTGCGCTGCACCTGCAGCCACTGCGCTCTGCTGCTGGGGCCGCCGCCCTG
GCTTTGACCGTGGACCTGCCACCCGCCTCCTCCGAGGCTCGGAACTCGGC
CTTCGGTTTCCAGGGCCGCTTGCTGCACCTGAGTGCCGGCCAGCGCCTGG
GCGTCCATCTTCACACTGAGGCCAGGGCACGCCATGCCTGGCAGCTTACC
CAGGGCGCCACAGTCTTGGGACTCTTCCGGGTGACCCCCGAAATC.

[0957] In some embodiments, the first chimeric polypeptide can include a sequence that is at least 80% identical (e.g., at least 82% identical, at least 84% identical, at least 86% identical, at least 88% identical, at least 90% identical, at least 92% identical, at least 94% identical, at least 96% identical, at least 98% identical, at least 99% identical, or 100% identical) to:

(SEQ ID NO: 236)
IPPHVQKSVNNDMIVTDNNGAVKFPQLCKFCDVRFSTCDNQKSCMSNCSI
TSICEKPQEVCVAVWRKNDENITLETVCHDPKLPYHDFILEDAASPKCIM
KEKKKPGETFFMCSCSSDECNDNIIFSEEYNTSNPDGGGGSGGGGSGGGG
SIPPHVQKSVNNDMIVTDNNGAVKFPQLCKFCDVRFSTCDNQKSCMSNCS
ITSICEKPQEVCVAVWRKNDENITLETVCHDPKLPYHDFILEDAASPKCI
MKEKKKPGETFFMCSCSSDECNDNIIFSEEYNTSNPDSGTTNTVAAYNLT
WKSTNFKTILEWEPKPVNQVYTVQISTKSGDWKSKCFYTTDTECDLTDEI
VKDVKQTYLARVFSYPAGNVESTGSAGEPLYENSPEFTPYLETNLGQPTI
QSFEQVGTKVNVTVEDERTLVRRNNTFLSLRDVFGKDLIYTLYYWKSSSS
GKKTAKTNTNEFLIDVDKGENYCFSVQAVIPSRTVNRKSTDSPVECMGQE
KGEFRENWVNVISDLKKIEDLIQSMHIDATLYTESDVHPSCKVTAMKCFL
LELQVISLESGDASIHDTVENLIILANNSLSSNGNVTESGCKECEELEEK
NIKEFLQSFVHIVQMFINTS.

[0958] In some embodiments, a first chimeric polypeptide is encoded by a sequence that is at least 80% identical (e.g., at least 82% identical, at least 84% identical, at least 86% identical, at least 88% identical, at least 90% identical, at least 92% identical, at least 94% identical, at least 96% identical, at least 98% identical, at least 99% identical, or 100% identical) to:

(SEQ ID NO: 237)
ATCCCCCCCCATGTGCAAAAGAGCGTGAACAACGATATGATCGTGACCGA
CAACAACGGCGCCGTGAAGTTTCCCCAGCTCTGCAAGTTCTGCGATGTCA
GGTTCAGCACCTGCGATAATCAGAAGTCCTGCATGTCCAACTGCAGCATC
ACCTCCATCTGCGAGAAGCCCCAAGAAGTGTGCGTGGCCGTGTGGCGGAA
AAATGACGAGAACATCACCCTGGAGACCGTGTGTCACGACCCCAAGCTCC
CTTATCACGACTTCATTCTGGAGGACGCTGCCTCCCCCAAATGCATCATG
AAGGAGAAGAAGAAGCCCGGAGAGACCTTCTTTATGTGTTCCTGTAGCAG
CGACGAGTGTAACGACAACATCATCTTCAGCGAAGAGTACAACACCAGCA
ACCCTGATGGAGGTGGCGGATCCGGAGGTGGAGGTTCTGGTGGAGGTGGG
AGTATTCCTCCCCACGTGCAGAAGAGCGTGAATAATGACATGATCGTGAC
CGATAACAATGGCGCCGTGAAATTTCCCCAGCTGTGCAAATTCTGCGATG
TGAGGTTTTCCACCTGCGACAACCAGAAGTCCTGTATGAGCAACTGCTCC
ATCACCTCCATCTGTGAGAAGCCTCAGGAGGTGTGCGTGGCTGTCTGGCG
GAAGAATGACGAGAATATCACCCTGGAAACCGTCTGCCACGATCCCAAGC
TGCCCTACCACGATTTCATCCTGGAAGACGCCGCCAGCCCTAAGTGCATC
ATGAAAGAGAAAAAGAAGCCTGGCGAGACCTTTTTCATGTGCTCCTGCAG
CAGCGACGAATGCAACGACAATATCATCTTTAGCGAGGAATACAATACCA
GCAACCCCGACAGCGGCACAACCAACACAGTCGCTGCCTATAACCTCACT
TGGAAGAGCACCAACTTCAAAACCATCCTCGAATGGGAACCCAAACCCGT
TAACCAAGTTTACACCGTGCAGATCAGCACCAAGTCCGGCGACTGGAAGT
CCAAATGTTTCTATACCACCGACACCGAGTGCGATCTCACCGATGAGATC
GTGAAAGATGTGAAACAGACCTACCTCGCCCGGGTGTTTAGCTACCCCGC
CGGCAATGTGGAGAGCACTGGTTCCGCTGGCGAGCCTTTATACGAGAACA
GCCCCGAATTTACCCCTTACCTCGAGACCAATTTAGGACAGCCCACCATC
CAAAGCTTTGAGCAAGTTGGCACAAAGGTGAATGTGACAGTGGAGGACGA
GCGGACTTTAGTGCGGCGGAACAACACCTTTCTCAGCCTCCGGGATGTGT
TCGGCAAAGATTTAATCTACACACTGTATTACTGGAAGTCCTCTTCCTCC
GGCAAGAAGACAGCTAAAACCAACACAAACGAGTTTTTAATCGACGTGGA
TAAAGGCGAAAACTACTGTTTCAGCGTGCAAGCTGTGATCCCCTCCCGGA
CCGTGAATAGGAAAAGCACCGATAGCCCCGTTGAGTGCATGGGCCAAGAA
AAGGGCGAGTTCCGGGAGAACTGGGTGAACGTCATCAGCGATTTAAAGAA
GATCGAAGATTTAATTCAGTCCATGCATATCGACGCCACTTTATACACAG
AATCCGACGTGCACCCCTCTTGTAAGGTGACCGCCATGAAATGTTTTTTA
CTGGAGCTGCAAGTTATCTCTTTAGAGAGCGGAGACGCTAGCATCCACGA
CACCGTGGAGAATTTAATCATTTTAGCCAATAACTCTTTATCCAGCAACG
GCAACGTGACAGAGTCCGGCTGCAAGGAGTGCGAAGAGCTGGAGGAGAAG
AACATCAAGGAGTTTCTGCAATCCTTTGTGCACATTGTCCAGATGTTCAT
CAATACCTCC.

[0959] In some embodiments, a first chimeric polypeptide can include a sequence that is at least 80% identical (e.g., at least 82% identical, at least 84% identical, at least 86% identical, at least 88% identical, at least 90% identical, at least 92% identical, at least 94% identical, at least 96% identical, at least 98% identical, at least 99% identical, or 100% identical) to:

(SEQ ID NO: 238)
MKWVTFISLLFLFSSAYSIPPHVQKSVNNDMIVTDNNGAVKFPQLCKFCD
VRFSTCDNQKSCMSNCSITSICEKPQEVCVAVWRKNDENITLETVCHDPK
LPYHDFILEDAASPKCIMKEKKKPGETFFMCSCSSDECNDNIIFSEEYNT
SNPDGGGGSGGGGSGGGGSIPPHVQKSVNNDMIVTDNNGAVKFPQLCKFC
DVRFSTCDNQKSCMSNCSITSICEKPQEVCVAVWRKNDENITLETVCHDP
KLPYHDFILEDAASPKCIMKEKKKPGETFFMCSCSSDECNDNIIFSEEYN
TSNPDSGTTNTVAAYNLTWKSTNFKTILEWEPKPVNQVYTVQISTKSGDW
KSKCFYTTDTECDLTDEIVKDVKQTYLARVFSYPAGNVESTGSAGEPLYE
NSPEFTPYLETNLGQPTIQSFEQVGTKVNVTVEDERTLVRRNNTFLSLRD
VFGKDLIYTLYYWKSSSSGKKTAKTNTNEFLIDVDKGENYCFSVQAVIPS
RTVNRKSTDSPVECMGQEKGEFRENWVNVISDLKKIEDLIQSMHIDATLY
TESDVHPSCKVTAMKCFLLELQVISLESGDASIHDTVENLIILANNSLSS
NGNVTESGCKECEELEEKNIKEFLQSFVHIVQMFINTS.

[0960] In some embodiments, a first chimeric polypeptide is encoded by a sequence that is at least 80% identical (e.g., at least 82% identical, at least 84% identical, at least 86% identical, at least 88% identical, at least 90% identical, at least 92% identical, at least 94% identical, at least 96% identical, at least 98% identical, at least 99% identical, or 100% identical) to:

(SEQ ID NO: 239)
ATGAAGTGGGTGACCTTCATCAGCCTGCTGTTCCTGTTCTCCAGCGCCTA
CTCCATCCCCCCCCATGTGCAAAAGAGCGTGAACAACGATATGATCGTGA
CCGACAACAACGGCGCCGTGAAGTTTCCCCAGCTCTGCAAGTTCTGCGAT
GTCAGGTTCAGCACCTGCGATAATCAGAAGTCCTGCATGTCCAACTGCAG
CATCACCTCCATCTGCGAGAAGCCCCAAGAAGTGTGCGTGGCCGTGTGGC
GGAAAAATGACGAGAACATCACCCTGGAGACCGTGTGTCACGACCCCAAG
CTCCCTTATCACGACTTCATTCTGGAGGACGCTGCCTCCCCCAAATGCAT
CATGAAGGAGAAGAAGAAGCCCGGAGAGACCTTCTTTATGTGTTCCTGTA
GCAGCGACGAGTGTAACGACAACATCATCTTCAGCGAAGAGTACAACACC
AGCAACCCTGATGGAGGTGGCGGATCCGGAGGTGGAGGTTCTGGTGGAGG
TGGGAGTATTCCTCCCCACGTGCAGAAGAGCGTGAATAATGACATGATCG
TGACCGATAACAATGGCGCCGTGAAATTTCCCCAGCTGTGCAAATTCTGC
GATGTGAGGTTTTCCACCTGCGACAACCAGAAGTCCTGTATGAGCAACTG
CTCCATCACCTCCATCTGTGAGAAGCCTCAGGAGGTGTGCGTGGCTGTCT
GGCGGAAGAATGACGAGAATATCACCCTGGAAACCGTCTGCCACGATCCC
AAGCTGCCCTACCACGATTTCATCCTGGAAGACGCCGCCAGCCCTAAGTG
CATCATGAAAGAGAAAAAGAAGCCTGGCGAGACCTTTTTCATGTGCTCCT
GCAGCAGCGACGAATGCAACGACAATATCATCTTTAGCGAGGAATACAAT
ACCAGCAACCCCGACAGCGGCACAACCAACACAGTCGCTGCCTATAACCT
CACTTGGAAGAGCACCAACTTCAAAACCATCCTCGAATGGGAACCCAAAC
CCGTTAACCAAGTTTACACCGTGCAGATCAGCACCAAGTCCGGCGACTGG
AAGTCCAAATGTTTCTATACCACCGACACCGAGTGCGATCTCACCGATGA
GATCGTGAAAGATGTGAAACAGACCTACCTCGCCCGGGTGTTTAGCTACC
CCGCCGGCAATGTGGAGAGCACTGGTTCCGCTGGCGAGCCTTTATACGAG
AACAGCCCCGAATTTACCCCTTACCTCGAGACCAATTTAGGACAGCCCAC
CATCCAAAGCTTTGAGCAAGTTGGCACAAAGGTGAATGTGACAGTGGAGG
ACGAGCGGACTTTAGTGCGGCGGAACAACACCTTTCTCAGCCTCCGGGAT
GTGTTCGGCAAAGATTTAATCTACACACTGTATTACTGGAAGTCCTCTTC
CTCCGGCAAGAAGACAGCTAAAACCAACACAAACGAGTTTTTAATCGACG
TGGATAAAGGCGAAAACTACTGTTTCAGCGTGCAAGCTGTGATCCCCTCC
CGGACCGTGAATAGGAAAAGCACCGATAGCCCCGTTGAGTGCATGGGCCA
AGAAAAGGGCGAGTTCCGGGAGAACTGGGTGAACGTCATCAGCGATTTAA
AGAAGATCGAAGATTTAATTCAGTCCATGCATATCGACGCCACTTTATAC
ACAGAATCCGACGTGCACCCCTCTTGTAAGGTGACCGCCATGAAATGTTT
TTTACTGGAGCTGCAAGTTATCTCTTTAGAGAGCGGAGACGCTAGCATCC
ACGACACCGTGGAGAATTTAATCATTTTAGCCAATAACTCTTTATCCAGC
AACGGCAACGTGACAGAGTCCGGCTGCAAGGAGTGCGAAGAGCTGGAGGA
GAAGAACATCAAGGAGTTTCTGCAATCCTTTGTGCACATTGTCCAGATGT
TCATCAATACCTCC.

[0961] In some embodiments, the second chimeric polypeptide can include a sequence that is at least 80% identical (e.g., at least 82% identical, at least 84% identical, at least 86% identical, at least 88% identical, at least 90% identical, at least 92% identical, at least 94% identical, at least 96% identical, at least 98% identical, at least 99% identical, or 100% identical) to:

(SEQ ID NO: 316)
IPPHVQKSVNNDMIVTDNNGAVKFPQLCKFCDVRFSTCDNQKSCMSNCSI
TSICEKPQEVCVAVWRKNDENITLETVCHDPKLPYHDFILEDAASPKCIM
KEKKKPGETFFMCSCSSDECNDNIIFSEEYNTSNPDGGGGSGGGGSGGGG
SIPPHVQKSVNNDMIVTDNNGAVKFPQLCKFCDVRFSTCDNQKSCMSNCS
ITSICEKPQEVCVAVWRKNDENITLETVCHDPKLPYHDFILEDAASPKCI
MKEKKKPGETFFMCSCSSDECNDNIIFSEEYNTSNPDITCPPPMSVEHAD
IWVKSYSLYSRERYICNSGFKRKAGTSSLTECVLNKATNVAHWTTPSLKC
IRGGGGSGGGGSGGGGSREGPELSPDDPAGLLDLRQGMFAQLVAQNVLLI
DGPLSWYSDPGLAGVSLTGGLSYKEDTKELVVAKAGVYYVFFQLELRRVV
AGEGSGSVSLALHLQPLRSAAGAAALALTVDLPPASSEARNSAFGFQGRL
LHLSAGQRLGVHLHTEARARHAWQLTQGATVLGLFRVTPEIPAGLPSPRS
E.

[0962] In some embodiments, a second chimeric polypeptide is encoded by a sequence that is at least 80% identical (e.g., at least 82% identical, at least 84% identical, at least 86% identical, at least 88% identical, at least 90% identical, at least 92% identical, at least 94% identical, at least 96% identical, at least 98% identical, at least 99% identical, or 100% identical) to:

(SEQ ID NO: 317)
ATCCCCCCCCATGTGCAAAAGAGCGTGAACAACGATATGATCGTGACCG
ACAACAACGGCGCCGTGAAGTTTCCCCAGCTCTGCAAGTTCTGCGATGT
CAGGTTCAGCACCTGCGATAATCAGAAGTCCTGCATGTCCAACTGCAGC
ATCACCTCCATCTGCGAGAAGCCCCAAGAAGTGTGCGTGGCCGTGTGGC
GGAAAAATGACGAGAACATCACCCTGGAGACCGTGTGTCACGACCCCAA
GCTCCCTTATCACGACTTCATTCTGGAGGACGCTGCCTCCCCCAAATGC
ATCATGAAGGAGAAGAAGAAGCCCGGAGAGACCTTCTTTATGTGTTCCT
GTAGCAGCGACGAGTGTAACGACAACATCATCTTCAGCGAAGAGTACAA
CACCAGCAACCCTGATGGAGGTGGCGGATCCGGAGGTGGAGGTTCTGGT
GGAGGTGGGAGTATTCCTCCCCACGTGCAGAAGAGCGTGAATAATGACA
TGATCGTGACCGATAACAATGGCGCCGTGAAATTTCCCCAGCTGTGCAA
ATTCTGCGATGTGAGGTTTTCCACCTGCGACAACCAGAAGTCCTGTATG
AGCAACTGCTCCATCACCTCCATCTGTGAGAAGCCTCAGGAGGTGTGCG
TGGCTGTCTGGCGGAAGAATGACGAGAATATCACCCTGGAAACCGTCTG
CCACGATCCCAAGCTGCCCTACCACGATTTCATCCTGGAAGACGCCGCC
AGCCCTAAGTGCATCATGAAAGAGAAAAAGAAGCCTGGCGAGACCTTTT
TCATGTGCTCCTGCAGCAGCGACGAATGCAACGACAATATCATCTTTAG
CGAGGAATACAATACCAGCAACCCCGACATTACATGCCCCCCTCCCATG
AGCGTGGAGCACGCCGACATCTGGGTGAAGAGCTATAGCCTCTACAGCC
GGGAGAGGTATATCTGTAACAGCGGCTTCAAGAGGAAGGCCGGCACCAG
CAGCCTCACCGAGTGCGTGCTGAATAAGGCTACCAACGTGGCTCACTGG
ACAACACCCTCTTTAAAGTGCATCCGGGGCGGTGGAGGATCCGGAGGAG
GTGGCTCCGGCGGCGGAGGATCTCGCGAGGGTCCCGAGCTTTCGCCCGA
CGATCCCGCCGGCCTCTTGGACCTGCGGCAGGGCATGTTTGCGCAGCTG
GTGGCCCAAAATGTTCTGCTGATCGATGGGCCCCTGAGCTGGTACAGTG
ACCCAGGCCTGGCAGGCGTGTCCCTGACGGGGGGCCTGAGCTACAAAGA
GGACACGAAGGAGCTGGTGGTGGCCAAGGCTGGAGTCTACTATGTCTTC
TTTCAACTAGAGCTGCGGCGCGTGGTGGCCGGCGAGGGCTCAGGCTCCG
TTTCACTTGCGCTGCACCTGCAGCCACTGCGCTCTGCTGCTGGGGCCGC
CGCCCTGGCTTTGACCGTGGACCTGCCACCCGCCTCCTCCGAGGCTCGG
AACTCGGCCTTCGGTTTCCAGGGCCGCTTGCTGCACCTGAGTGCCGGCC
AGCGCCTGGGCGTCCATCTTCACACTGAGGCCAGGGCACGCCATGCCTG
GCAGCTTACCCAGGGCGCCACAGTCTTGGGACTCTTCCGGGTGACCCCC
GAAATCCCAGCCGGACTCCCTTCACCGAGGTCGGAA.

[0963] In some embodiments, a second chimeric polypeptide can include a sequence that is at least 80% identical (e.g., at least 82% identical, at least 84% identical, at least 86% identical, at least 88% identical, at least 90% identical, at least 92% identical, at least 94% identical, at least 96% identical, at least 98% identical, at least 99% identical, or 100% identical) to:

(SEQ ID NO: 318)
MKWVTFISLLFLFSSASIPPHVQKSVNNDMIVTDNNGAVKFPQLCKFCD
VRFSTCDNQKSCMSNCSITSICEKPQEVCVAVWRKNDENITLETVCHDP
KLPYHDFILEDAASPKCIMKEKKKPGETFFMCSCSSDECNDNIIFSEEY
NTSNPDGGGGSGGGGSGGGGSIPPHVQKSVNNDMIVTDNNGAVKFPQLC
KFCDVRFSTCDNQKSCMSNCSITSICEKPQEVCVAVWRKNDENITLETV
CHDPKLPYHDFILEDAASPKCIMKEKKKPGETFFMCSCSSDECNDNIIF
SEEYNTSNPDITCPPPMSVEHADIWVKSYSLYSRERYICNSGFKRKAGT
SSLTECVLNKATNVAHWTTPSLKCIRGGGGSGGGGSGGGGSREGPELSP
DDPAGLLDLRQGMFAQLVAQNVLLIDGPLSWYSDPGLAGVSLTGGLSYK
EDTKELVVAKAGVYYVFFQLELRRVVAGEGSGSVSLALHLQPLRSAAGA
AALALTVDLPPASSEARNSAFGFQGRLLHLSAGQRLGVHLHTEARARHA
WQLTQGATVLGLFRVTPEIPAGLPSPRSE.

[0964] In some embodiments, a second chimeric polypeptide is encoded by a sequence that is at least 80% identical (e.g., at least 82% identical, at least 84% identical, at least 86% identical, at least 88% identical, at least 90% identical, at least 92% identical, at least 94% identical, at least 96% identical, at least 98% identical, at least 99% identical, or 100% identical) to:

(SEQ ID NO: 319)
ATGAAGTGGGTGACCTTCATCAGCCTGCTGTTCCTGTTCTCCAGCGCCT
ACTCCATCCCCCCCCATGTGCAAAAGAGCGTGAACAACGATATGATCGT
GACCGACAACAACGGCGCCGTGAAGTTTCCCCAGCTCTGCAAGTTCTGC
GATGTCAGGTTCAGCACCTGCGATAATCAGAAGTCCTGCATGTCCAACT
GCAGCATCACCTCCATCTGCGAGAAGCCCCAAGAAGTGTGCGTGGCCGT
GTGGCGGAAAAATGACGAGAACATCACCCTGGAGACCGTGTGTCACGAC
CCCAAGCTCCCTTATCACGACTTCATTCTGGAGGACGCTGCCTCCCCCA
AATGCATCATGAAGGAGAAGAAGAAGCCCGGAGAGACCTTCTTTATGTG
TTCCTGTAGCAGCGACGAGTGTAACGACAACATCATCTTCAGCGAAGAG
TACAACACCAGCAACCCTGATGGAGGTGGCGGATCCGGAGGTGGAGGTT
CTGGTGGAGGTGGGAGTATTCCTCCCCACGTGCAGAAGAGCGTGAATAA
TGACATGATCGTGACCGATAACAATGGCGCCGTGAAATTTCCCCAGCTG
TGCAAATTCTGCGATGTGAGGTTTTCCACCTGCGACAACCAGAAGTCCT
GTATGAGCAACTGCTCCATCACCTCCATCTGTGAGAAGCCTCAGGAGGT
GTGCGTGGCTGTCTGGCGGAAGAATGACGAGAATATCACCCTGGAAACC
GTCTGCCACGATCCCAAGCTGCCCTACCACGATTTCATCCTGGAAGACG
CCGCCAGCCCTAAGTGCATCATGAAAGAGAAAAAGAAGCCTGGCGAGAC
CTTTTTCATGTGCTCCTGCAGCAGCGACGAATGCAACGACAATATCATC
TTTAGCGAGGAATACAATACCAGCAACCCCGACATTACATGCCCCCCTC
CCATGAGCGTGGAGCACGCCGACATCTGGGTGAAGAGCTATAGCCTCTA
CAGCCGGGAGAGGTATATCTGTAACAGCGGCTTCAAGAGGAAGGCCGGC
ACCAGCAGCCTCACCGAGTGCGTGCTGAATAAGGCTACCAACGTGGCTC
ACTGGACAACACCCTCTTTAAAGTGCATCCGGGGCGGTGGAGGATCCGG
AGGAGGTGGCTCCGGCGGCGGAGGATCTCGCGAGGGTCCCGAGCTTTCG
CCCGACGATCCCGCCGGCCTCTTGGACCTGCGGCAGGGCATGTTTGCGC
AGCTGGTGGCCCAAAATGTTCTGCTGATCGATGGGCCCCTGAGCTGGTA
CAGTGACCCAGGCCTGGCAGGCGTGTCCCTGACGGGGGGCCTGAGCTAC
AAAGAGGACACGAAGGAGCTGGTGGTGGCCAAGGCTGGAGTCTACTATG
TCTTCTTTCAACTAGAGCTGCGGCGCGTGGTGGCCGGCGAGGGCTCAGG
CTCCGTTTCACTTGCGCTGCACCTGCAGCCACTGCGCTCTGCTGCTGGG
GCCGCCGCCCTGGCTTTGACCGTGGACCTGCCACCCGCCTCCTCCGAGG
CTCGGAACTCGGCCTTCGGTTTCCAGGGCCGCTTGCTGCACCTGAGTGC
CGGCCAGCGCCTGGGCGTCCATCTTCACACTGAGGCCAGGGCACGCCAT
GCCTGGCAGCTTACCCAGGGCGCCACAGTCTTGGGACTCTTCCGGGTGA
CCCCCGAAATCCCAGCCGGACTCCCTTCACCGAGGTCGGAA.

### Methods of Treating an Aging-Related Disease or Condition

[0965] Provided herein are methods of treating an aging-related disease or condition (e.g. any of the exemplary types of aging-related disease or condition described herein or known in the art) in a subject in need thereof that include administering to a subject identified as having an aging-related disease or condition (e.g. any of the exemplary types of aging-related disease or condition described herein or known in the art) a therapeutically effective amount of one or more natural killer (NK) cell activating agent(s) (e.g. any of the natural killer (NK) cell activating agent(s) described herein or known in the art).

[0966] Provided herein are methods of treating an aging-related disease or condition (e.g. any of the exemplary types of aging-related disease or condition described herein or known in the art) in a subject in need thereof that include administering to a subject identified as having an aging-related disease or condition (e.g. any of the exemplary types of aging-related disease or condition described herein or known in the art) a therapeutically effective amount of activated NK cells (e.g. any of the activated NK cells described herein or known in the art).

[0967] Some embodiments of these methods further include: obtaining a resting NK cell; and contacting the resting NK cell in vitro in a liquid culture medium including one or more NK cell activating agent(s), where the contacting results in the generation of the activated NK cells that are subsequently administered to the subject. In some examples of these methods, the resting NK cell is an autologous NK cell obtained from the subject. In some examples of these methods, the resting NK cell is a haploidentical NK cell obtained from the subject. In some examples of these methods, the resting NK cell is an allogeneic resting NK cell. In some examples of these methods, the resting NK cell is an artificial NK cell. In some examples of any of these methods, the resting NK cell is a genetically-engineered NK cell carrying a chimeric antigen receptor or recombinant T cell receptor.

[0968] In some examples of these methods, the liquid culture medium is a serum-free liquid culture medium. In some embodiments of any of the methods described herein, the liquid culture medium is a chemically-defined liquid culture medium. Some examples of these methods further include isolating the activated NK cells (and optionally further administering a therapeutically effective amount of the activated NK cells to a subject, e.g., any of the subjects described herein). In some embodiments of these methods, the contacting step is performed for a period of about 2 hours to about 20 days (or any of the subranges of this range described herein).

[0969] In some embodiments of any of the methods described herein, the aging-related disease or condition is selected from the group of: a cancer, an autoimmune disease, a metabolic disease, a neurodegenerative disease, a cardiovascular disease, a skin disease, a progeria disease, and a fragility disease.

[0970] Non-limiting examples of cancer include: solid tumor, hematological tumor, sarcoma, osteosarcoma, glioblastoma, neuroblastoma, melanoma, rhabdomyosarcoma, Ewing sarcoma, osteosarcoma, B-cell neoplasms, multiple myeloma, B-cell lymphoma, B-cell non-Hodgkin's lymphoma, Hodgkin's lymphoma, chronic lymphocytic leukemia (CLL), acute myeloid leukemia (AML), chronic myeloid leukemia (CML), acute lymphocytic leukemia (ALL), myelodysplastic syndromes (MDS), cutaneous T-cell lymphoma, retinoblastoma, stomach cancer, urothelial carcinoma, lung cancer, renal cell carcinoma, gastric and esophageal cancer, pancreatic cancer, prostate cancer, breast cancer, colorectal cancer, ovarian cancer, non-small cell lung carcinoma, squamous cell head and neck carcinoma, endometrial cancer, cervical cancer, liver cancer, and hepatocellular carcinoma.

[0971] A non-limiting example of an autoimmune disease is type-1 diabetes.

[0972] Non-limiting examples of metabolic disease include: obesity, a lipodystrophy, and type-2 diabetes mellitus.

[0973] Non-limiting examples of neurodegenerative disease include: Alzheimer's disease, Parkinson's disease, and dementia.

[0974] Non-limiting examples of cardiovascular disease include: coronary artery disease, atherosclerosis, and pulmonary arterial hypertension.

[0975] Non-limiting examples of skin disease include: wound healing, alopecia, wrinkles, senile lentigo, skin thinning, xeroderma pigmentosum, and dyskeratosis congenita.

[0976] Non-limiting examples of progeria disease include: progeria and Hutchinson-Gilford Progeria Syndrome.

[0977] Non-limiting examples of fragility disease include: frailty, responsiveness to vaccination, osteoporosis, and sarcopenia.

[0978] In some embodiments of any of the aging-related disease or condition described herein, the aging-related disease or condition is selected from the group of: age-related macular degeneration, osteoarthritis, adipose atrophy, idiopathic pulmonary fibrosis, kidney transplant failure, liver fibrosis, loss of bone mass, sarcopenia, age-associated loss of lung tissue elasticity, osteoporosis, age-associated renal dysfunction, and chemical-induced renal dysfunction.

[0979] In some embodiments of any of the aging-related disease or condition described herein, the aging-related disease or condition is type-2 diabetes or atherosclerosis.

[0980] In some embodiments of any of the methods described herein, the subject has been diagnosed or identified as having an aging-related disease or condition (e.g., any of the exemplary aging-related diseases or conditions described herein). Some embodiments of any of the methods described herein can include a step of selecting a subject identified or diagnosed as having an aging-related disease or condition (e.g., any of the exemplary aging-related diseases or conditions described herein).

[0981] In some embodiments of these methods, the administering results in a decrease (e.g., at least a 5% decrease, at least a 10% decrease, at least a 15% decrease, at least a 20% decrease, at least a 25% decrease, at least a 30% decrease, at least a 35% decrease, at least a 40% decrease, at least a 45% decrease, at least a 50% decrease, at least a 55% decrease, at least a 60% decrease, at least a 65% decrease, at least a 70% decrease, at least a 75% decrease, at least a 80% decrease, at least a 85% decrease, at least a 90% decrease, or at least a 95% decrease, or about a 10% decrease to about a 99% decrease, about a 10% decrease to about a 95% decrease, about a 10% decrease to about a 90% decrease, about a 10% decrease to about a 85% decrease, about a 10% decrease to about a 80% decrease, about a 10% decrease to about a 75% decrease, about a 10% decrease to about a 70% decrease, about a 10% decrease to about a 65% decrease, about a 10% decrease to about a 60% decrease, about a 10% decrease to about a 55% decrease, about a 10% decrease to about a 50% decrease, about a 10% decrease to about a 45% decrease, about a 10% decrease to about a 40% decrease, about a 10% decrease to about a 35% decrease, about a 10% decrease to about a 30% decrease, about a 10% decrease to about a 25% decrease, about a 10% decrease to about a 20% decrease, about a 10% decrease to about a 15% decrease, about a 15% decrease to about a 99% decrease, about a 15% decrease to about a 95% decrease, about a 15% decrease to about a 90% decrease, about a 15% decrease to about a 85% decrease, about a 15% decrease to about a 80% decrease, about a 15% decrease to about a 75% decrease, about a 15% decrease to about a 70% decrease, about a 15% decrease to about a 65% decrease, about a 15% decrease to about a 60% decrease, about a 15% decrease to about a 55% decrease, about a 15% decrease to about a 50% decrease, about a 15% decrease to about a 45% decrease, about a 15% decrease to about a 40% decrease, about a 15% decrease to about a 35% decrease, about a 15% decrease to about a 30% decrease, about a 15% decrease to about a 25% decrease, about a 15% decrease to about a 20% decrease, about a 20% decrease to about a 99% decrease, about a 20% decrease to about a 95% decrease, about a 20% decrease to about a 90% decrease, about a 20% decrease to about a 85% decrease, about a 20% decrease to about a 80% decrease, about a 20% decrease to about a 75% decrease, about a 20% decrease to about a 70% decrease, about a 20% decrease to about a 65% decrease, about a 20% decrease to about a 60% decrease, about a 20% decrease to about a 55% decrease, about a 20% decrease to about a 50% decrease, about a 20% decrease to about a 45% decrease, about a 20% decrease to about a 40% decrease, about a 20% decrease to about a 35% decrease, about a 20% decrease to about a 30% decrease, about a 20% decrease to about a 25% decrease, about a 25% decrease to about a 99% decrease, about a 25% decrease to about a 95% decrease, about a 25% decrease to about a 90% decrease, about a 25% decrease to about a 85% decrease, about a 25% decrease to about a 80% decrease, about a 25% decrease to about a 75% decrease, about a 25% decrease to about a 70% decrease, about a 25% decrease to about a 65% decrease, about a 25% decrease to about a 60% decrease, about a 25% decrease to about a 55% decrease, about a 25% decrease to about a 50% decrease, about a 25% decrease to about a 45% decrease, about a 25% decrease to about a 40% decrease, about a 25% decrease to about a 35% decrease, about a 25% decrease to about a 30% decrease, about a 30% decrease to about a 99% decrease, about a 30% decrease to about a 95% decrease, about a 30% decrease to about a 90% decrease, about a 30% decrease to about a 85% decrease, about a 30% decrease to about a 80% decrease, about a 30% decrease to about a 75% decrease, about a 30% decrease to about a 70% decrease, about a 30% decrease to about a 65% decrease, about a 30% decrease to about a 60% decrease, about a 30% decrease to about a 55% decrease, about a 30% decrease to about a 50% decrease, about a 30% decrease to about a 45% decrease, about a 30% decrease to about a 40% decrease, about a 30% decrease to about a 35% decrease, about a 35% decrease to about a 99% decrease, about a 35% decrease to about a 95% decrease, about a 35% decrease to about a 90% decrease, about a 35% decrease to about a 85% decrease, about a 35% decrease to about a 80% decrease, about a 35% decrease to about a 75% decrease, about a 35% decrease to about a 70% decrease, about a 35% decrease to about a 65% decrease, about a 35% decrease to about a 60% decrease, about a 35% decrease to about a 55% decrease, about a 35% decrease to about a 50% decrease, about a 35% decrease to about a 45% decrease, about a 35% decrease to about a 40% decrease, about a 40% decrease to about a 99% decrease, about a 40% decrease to about a 95% decrease, about a 40% decrease to about a 90% decrease, about a 40% decrease to about a 85% decrease, about a 40% decrease to about a 80% decrease, about a 40% decrease to about a 75% decrease, about a 40% decrease to about a 70% decrease, about a 40% decrease to about a 65% decrease, about a 40% decrease to about a 60% decrease, about a 40% decrease to about a 55% decrease, about a 40% decrease to about a 50% decrease, about a 40% decrease to about a 45% decrease, about a 45% decrease to about a 99% decrease, about a 45% decrease to about a 95% decrease, about a 45% decrease to about a 90% decrease, about a 45% decrease to about a 85% decrease, about a 45% decrease to about a 80% decrease, about a 45% decrease to about a 75% decrease, about a 45% decrease to about a 70% decrease, about a 45% decrease to about a 65% decrease, about a 45% decrease to about a 60% decrease, about a 45% decrease to about a 55% decrease, about a 45% decrease to about a 50% decrease, about a 50% decrease to about a 99% decrease, about a 50% decrease to about a 95% decrease, about a 50% decrease to about a 90% decrease, about a 50% decrease to about a 85% decrease, about a 50% decrease to about a 80% decrease, about a 50% decrease to about a 75% decrease, about a 50% decrease to about a 70% decrease, about a 50% decrease to about a 65% decrease, about a 50% decrease to about a 60% decrease, about a 50% decrease to about a 55% decrease, about a 55% decrease to about a 99% decrease, about a 55% decrease to about a 95% decrease, about a 55% decrease to about a 90% decrease, about a 55% decrease to about a 85% decrease, about a 55% decrease to about a 80% decrease, about a 55% decrease to about a 75% decrease, about a 55% decrease to about a 70% decrease, about a 55% decrease to about a 65% decrease, about a 55% decrease to about a 60% decrease, about a 60% decrease to about a 99% decrease, about a 60% decrease to about a 95% decrease, about a 60% decrease to about a 90% decrease, about a 60% decrease to about a 85% decrease, about a 60% decrease to about a 80% decrease, about a 60% decrease to about a 75% decrease, about a 60% decrease to about a 70% decrease, about a 60% decrease to about a 65% decrease, about a 65% decrease to about a 99% decrease, about a 65% decrease to about a 95% decrease, about a 65% decrease to about a 90% decrease, about a 65% decrease to about a 85% decrease, about a 65% decrease to about a 80% decrease, about a 65% decrease to about a 75% decrease, about a 65% decrease to about a 70% decrease, about a 70% decrease to about a 99% decrease, about a 70% decrease to about a 95% decrease, about a 70% decrease to about a 90% decrease, about a 70% decrease to about a 85% decrease, about a 70% decrease to about a 80% decrease, about a 70% decrease to about a 75% decrease, about a 75% decrease to about a 99% decrease, about a 75% decrease to about a 95% decrease, about a 75% decrease to about a 90% decrease, about a 75% decrease to about a 85% decrease, about a 75% decrease to about a 80% decrease, about a 80% decrease to about a 99% decrease, about a 80% decrease to about a 95% decrease, about a 80% decrease to about a 90% decrease, about a 80% decrease to about a 85% decrease, about a 85% decrease to about a 99% decrease, about a 85% decrease to about a 95% decrease, about a 85% decrease to about a 90% decrease, about a 90% decrease to about a 99% decrease, about a 90% decrease to about a 95% decrease, or about a 95% decrease to about a 99% decrease) in the number of senescent cells in a target tissue in the subject, e.g., as compared to the number of senescent cells in the target tissue in the subject prior to treatment.

[0982] In some embodiments of these methods, the administering results in an increase (e.g., at least a 5% increase, at least a 10% increase, at least a 15% increase, at least a 20% increase, at least a 25% increase, at least a 30% increase, at least a 35% increase, at least a 40% increase, at least a 45% increase, at least a 50% increase, at least a 55% increase, at least a 60% increase, at least a 65% increase, at least a 70% increase, at least a 75% increase, at least a 80% increase, at least a 85% increase, at least a 90% increase, at least a 95% increase, or at least a 99% increase, or about a 10% increase to about a 500% increase (or any of the subranges of this range described herein) in the levels of IFN-γ, a cytotoxic granule granzyme, and/or perform in the subject, as compared to the levels in a subject prior to treatment or a similar control subject who has not received a treatment.

[0983] In some embodiments, these methods can result in a reduction in the number, severity, or frequency of one or more symptoms of the cancer in the subject (e.g., as compared to the number, severity, or frequency of the one or more symptoms of the cancer in the subject prior to treatment). In some embodiments, these methods can result in a reduction (e.g., about 1% reduction to about 99% reduction, about 1% reduction to about 95% reduction, about 1% reduction to about 90% reduction, about 1% reduction to about 85% reduction, about 1% reduction to about 80% reduction, about 1% reduction to about 75% reduction, about 1% reduction to about 70% reduction, about 1% reduction to about 65% reduction, about 1% reduction to about 60% reduction, about 1% reduction to about 55% reduction, about 1% reduction to about 50% reduction, about 1% reduction to about 45% reduction, about 1% reduction to about 40% reduction, about 1% reduction to about 35% reduction, about 1% reduction to about 30% reduction, about 1% reduction to about 25% reduction, about 1% reduction to about 20% reduction, about 1% reduction to about 15% reduction, about 1% reduction to about 10% reduction, about 1% reduction to about 5% reduction, about 5% reduction to about 99% reduction, about 5% reduction to about 95% reduction, about 5% reduction to about 90% reduction, about 5% reduction to about 85% reduction, about 5% reduction to about 80% reduction, about 5% reduction to about 75% reduction, about 5% reduction to about 70% reduction, about 5% reduction to about 65% reduction, about 5% reduction to about 60% reduction, about 5% reduction to about 55% reduction, about 5% reduction to about 50% reduction, about 5% reduction to about 45% reduction, about 5% reduction to about 40% reduction, about 5% reduction to about 35% reduction, about 5% reduction to about 30% reduction, about 5% reduction to about 25% reduction, about 5% reduction to about 20% reduction, about 5% reduction to about 15% reduction, about 5% reduction to about 10% reduction, about 10% reduction to about 99% reduction, about 10% reduction to about 95% reduction, about 10% reduction to about 90% reduction, about 10% reduction to about 85% reduction, about 10% reduction to about 80% reduction, about 10% reduction to about 75% reduction, about 10% reduction to about 70% reduction, about 10% reduction to about 65% reduction, about 10% reduction to about 60% reduction, about 10% reduction to about 55% reduction, about 10% reduction to about 50% reduction, about 10% reduction to about 45% reduction, about 10% reduction to about 40% reduction, about 10% reduction to about 35% reduction, about 10% reduction to about 30% reduction, about 10% reduction to about 25% reduction, about 10% reduction to about 20% reduction, about 10% reduction to about 15% reduction, about 15% reduction to about 99% reduction, about 15% reduction to about 95% reduction, about 15% reduction to about 90% reduction, about 15% reduction to about 85% reduction, about 15% reduction to about 80% reduction, about 15% reduction to about 75% reduction, about 15% reduction to about 70% reduction, about 15% reduction to about 65% reduction, about 15% reduction to about 60% reduction, about 15% reduction to about 55% reduction, about 15% reduction to about 50% reduction, about 15% reduction to about 45% reduction, about 15% reduction to about 40% reduction, about 15% reduction to about 35% reduction, about 15% reduction to about 30% reduction, about 15% reduction to about 25% reduction, about 15% reduction to about 20% reduction, about 20% reduction to about 99% reduction, about 20% reduction to about 95% reduction, about 20% reduction to about 90% reduction, about 20% reduction to about 85% reduction, about 20% reduction to about 80% reduction, about 20% reduction to about 75% reduction, about 20% reduction to about 70% reduction, about 20% reduction to about 65% reduction, about 20% reduction to about 60% reduction, about 20% reduction to about 55% reduction, about 20% reduction to about 50% reduction, about 20% reduction to about 45% reduction, about 20% reduction to about 40% reduction, about 20% reduction to about 35% reduction, about 20% reduction to about 30% reduction, about 20% reduction to about 25% reduction, about 25% reduction to about 99% reduction, about 25% reduction to about 95% reduction, about 25% reduction to about 90% reduction, about 25% reduction to about 85% reduction, about 25% reduction to about 80% reduction, about 25% reduction to about 75% reduction, about 25% reduction to about 70% reduction, about 25% reduction to about 65% reduction, about 25% reduction to about 60% reduction, about 25% reduction to about 55% reduction, about 25% reduction to about 50% reduction, about 25% reduction to about 45% reduction, about 25% reduction to about 40% reduction, about 25% reduction to about 35% reduction, about 25% reduction to about 30% reduction, about 30% reduction to about 99% reduction, about 30% reduction to about 95% reduction, about 30% reduction to about 90% reduction, about 30% reduction to about 85% reduction, about 30% reduction to about 80% reduction, about 30% reduction to about 75% reduction, about 30% reduction to about 70% reduction, about 30% reduction to about 65% reduction, about 30% reduction to about 60% reduction, about 30% reduction to about 55% reduction, about 30% reduction to about 50% reduction, about 30% reduction to about 45% reduction, about 30% reduction to about 40% reduction, about 30% reduction to about 35% reduction, about 35% reduction to about 99% reduction, about 35% reduction to about 95% reduction, about 35% reduction to about 90% reduction, about 35% reduction to about 85% reduction, about 35% reduction to about 80% reduction, about 35% reduction to about 75% reduction, about 35% reduction to about 70% reduction, about 35% reduction to about 65% reduction, about 35% reduction to about 60% reduction, about 35% reduction to about 55% reduction, about 35% reduction to about 50% reduction, about 35% reduction to about 45% reduction, about 35% reduction to about 40% reduction, about 40% reduction to about 99% reduction, about 40% reduction to about 95% reduction, about 40% reduction to about 90% reduction, about 40% reduction to about 85% reduction, about 40% reduction to about 80% reduction, about 40% reduction to about 75% reduction, about 40% reduction to about 70% reduction, about 40% reduction to about 65% reduction, about 40% reduction to about 60% reduction, about 40% reduction to about 55% reduction, about 40% reduction to about 50% reduction, about 40% reduction to about 45% reduction, about 45% reduction to about 99% reduction, about 45% reduction to about 95% reduction, about 45% reduction to about 90% reduction, about 45% reduction to about 85% reduction, about 45% reduction to about 80% reduction, about 45% reduction to about 75% reduction, about 45% reduction to about 70% reduction, about 45% reduction to about 65% reduction, about 45% reduction to about 60% reduction, about 45% reduction to about 55% reduction, about 45% reduction to about 50% reduction, about 50% reduction to about 99% reduction, about 50% reduction to about 95% reduction, about 50% reduction to about 90% reduction, about 50% reduction to about 85% reduction, about 50% reduction to about 80% reduction, about 50% reduction to about 75% reduction, about 50% reduction to about 70% reduction, about 50% reduction to about 65% reduction, about 50% reduction to about 60% reduction, about 50% reduction to about 55% reduction, about 55% reduction to about 99% reduction, about 55% reduction to about 95% reduction, about 55% reduction to about 90% reduction, about 55% reduction to about 85% reduction, about 55% reduction to about 80% reduction, about 55% reduction to about 75% reduction, about 55% reduction to about 70% reduction, about 55% reduction to about 65% reduction, about 55% reduction to about 60% reduction, about 60% reduction to about 99% reduction, about 60% reduction to about 95% reduction, about 60% reduction to about 90% reduction, about 60% reduction to about 85% reduction, about 60% reduction to about 80% reduction, about 60% reduction to about 75% reduction, about 60% reduction to about 70% reduction, about 60% reduction to about 65% reduction, about 65% reduction to about 99% reduction, about 65% reduction to about 95% reduction, about 65% reduction to about 90% reduction, about 65% reduction to about 85% reduction, about 65% reduction to about 80% reduction, about 65% reduction to about 75% reduction, about 65% reduction to about 70% reduction, about 70% reduction to about 99% reduction, about 70% reduction to about 95% reduction, about 70% reduction to about 90% reduction, about 70% reduction to about 85% reduction, about 70% reduction to about 80% reduction, about 70% reduction to about 75% reduction, about 75% reduction to about 99% reduction, about 75% reduction to about 95% reduction, about 75% reduction to about 90% reduction, about 75% reduction to about 85% reduction, about 75% reduction to about 80% reduction, about 80% reduction to about 99% reduction, about 80% reduction to about 95% reduction, about 80% reduction to about 90% reduction, about 80% reduction to about 85% reduction, about 85% reduction to about 99% reduction, about 85% reduction to about 95% reduction, about 85% reduction to about 90% reduction, about 90% reduction to about 99% reduction, about 90% reduction to about 95% reduction, or about 95% reduction to about 99% reduction) in the volume of one or more solid tumors in the subject (e.g., as compared to the volume of the one or more solid tumors prior to treatment or at the start of treatment). In some embodiments, the these methods can reduce (e.g., about 1% reduction to about 99% reduction, or any of the subranges of this range described herein) the risk of developing a metastasis or developing one or more additional metastasis in a subject (e.g., as compared to the risk of developing a metastasis or developing one or more additional metastasis in a subject prior to treatment or in a similar subject or a population of subjects administered a different treatment).

[0984] In some embodiments, these methods can result in treatment of metabolic disease in the subject. In some embodiments, the treatment of metabolic disease can result in, e.g., one or more (e.g., two, three, four, five, or six) improved glucose tolerance, improved glucose utilization, decreased severity or progression of diabetic osteoarthropathy, decreased severity or progression of skin lesions, decreased severity or progression of ketosis, decreased generation of autoantibodies against islet cells, increased insulin sensitivity, decreased mass, and decreased body mass index. The response of a subject to treatment can be monitored by determining fasting glucose or glucose tolerance according to standard techniques. Typically, in accordance with the method, blood glucose is lowered so as to achieve a blood glucose level characterized by a fasting blood glucose of less than 100 mg/dL or a two-hour 75-g oral glucose tolerance test values of less than 140 mg/dL. In some embodiments, response to treatment may include determining other factors relevant to pre-diabetes, new-onset diabetes, or active diabetes including blood pressure, body mass index, PPARy function, lipid metabolism, glycated hemoglobin (H1c), and renal function.

[0985] In some embodiments, these methods can eliminate or reduce the risk, lessen the severity, or delay the outset of the neurodegenerative disease, including biochemical, histologic and/or behavioral symptoms of the disease, its complications and intermediate pathological phenotypes presenting during development of the disease.

[0986] In some embodiments, effective treatment of a skin disease can be assessed by any method described herein or known in the art, including inspecting skin conditions that include skin color, moisture, temperature, texture, mobility and turgor, and skin lesions, as compared to the skin conditions prior to treatment.

[0987] In some embodiments, effective treatment of an autoimmune disease can be assessed by any method described herein or known in the art, including monitoring full blood count analysis on freshly isolated PBMCs, total Ig levels, and analysis of serum autoantibody titers.

[0988] In some embodiments, effective treatment of a fragility disease can be assessed by any method described herein or known in the art, including monitoring bone mineral density, bone architecture and geometry, biomedical markers of bone turnover, vitamin D measurement, Karnofsky performance status and ECOG scores, and responsiveness to vaccination.

### Methods of Killing or Reducing the Number of Senescent Cells in a Subject

[0989] Provided herein are methods of killing or reducing the number of senescent cells (e.g. any of the exemplary types of senescent cells described herein or known in the art) in a subject in need thereof that include administering to the subject a therapeutically effective amount of one or more NK cell activating agent(s) (e.g. any of the NK cell activating agent(s) described herein or known in the art).

[0990] Also provided herein are methods of killing or reducing the number of senescent cells (e.g. any of the exemplary types of senescent cells described herein or known in the art) in a subject in need thereof that include administering to the subject a therapeutically effective amount of activated NK cells (e.g. any of the activated NK cells described herein or known in the art).

[0991] Some embodiments of these methods further include: obtaining a resting NK cell; and contacting the resting NK cell in vitro in a liquid culture medium including one or more NK cell activating agent(s), where the contacting results in the generation of the activated NK cells that are subsequently administered to the subject. In some examples of these methods, the resting NK cell is an autologous NK cell obtained from the subject. In some examples of these methods, the resting NK cell is a haploidentical NK cell obtained from the subject. In some examples of these methods, the resting NK cell is an allogeneic resting NK cell. In some examples of these methods, the resting NK cell is an artificial NK cell. In some examples of any of these methods, the resting NK cell is a genetically-engineered NK cell carrying a chimeric antigen receptor or recombinant T cell receptor.

[0992] In some examples of these methods, the liquid culture medium is a serum-free liquid culture medium. In some embodiments of any of the methods described herein, the liquid culture medium is a chemically-defined liquid culture medium. Some examples of these methods further include isolating the activated NK cells (and further administering a therapeutically effective amount of the activated NK cells to a subject, e.g., any of the subjects described herein). In some embodiments of these methods, the contacting step is performed for a period of about 2 hours to about 20 days (or any of the subranges of this range described herein).

[0993] In some embodiments of these methods, the senescent cells are senescent cancer cells, senescent monocytes, senescent lymphocytes, senescent astrocytes, senescent microglia, senescent neurons, senescent tissue fibroblasts, senescent dermal fibroblasts, senescent keratinocytes, or other differentiated tissue-specific dividing functional cells. In some embodiments of these methods, senescent cancer cells are chemotherapy-induced senescent cells or radiation-induced senescent cells.

[0994] In some embodiments of these methods, the subject has been identified or diagnosed as having an aging-related disease or condition (e.g., any of the aging-related diseases or conditions described herein or known in the art). In some embodiments of any of the aging-related disease or condition described herein, the aging-related disease or condition is selected from the group of: a cancer, an autoimmune disease, a metabolic disease, a neurodegenerative disease, a cardiovascular disease, a skin disease, a progeria disease, and a fragility disease.

[0995] Non-limiting examples of cancer include: solid tumor, hematological tumor, sarcoma, osteosarcoma, glioblastoma, neuroblastoma, melanoma, rhabdomyosarcoma, Ewing sarcoma, osteosarcoma, B-cell neoplasms, multiple myeloma, B-cell lymphoma, B-cell non-Hodgkin's lymphoma, Hodgkin's lymphoma, chronic lymphocytic leukemia (CLL), acute myeloid leukemia (AML), chronic myeloid leukemia (CML), acute lymphocytic leukemia (ALL), myelodysplastic syndromes (MDS), cutaneous T-cell lymphoma, retinoblastoma, stomach cancer, urothelial carcinoma, lung cancer, renal cell carcinoma, gastric and esophageal cancer, pancreatic cancer, prostate cancer, breast cancer, colorectal cancer, ovarian cancer, non-small cell lung carcinoma, squamous cell head and neck carcinoma, endometrial cancer, cervical cancer, liver cancer, and hepatocellular carcinoma.

[0996] A non-limiting example of an autoimmune disease is type-1 diabetes.

[0997] Non-limiting examples of metabolic disease include: obesity, a lipodystrophy, and type-2 diabetes mellitus.

[0998] Non-limiting examples of neurodegenerative disease include: Alzheimer's disease, Parkinson's disease, and dementia.

[0999] Non-limiting examples of cardiovascular disease include: coronary artery disease, atherosclerosis, and pulmonary arterial hypertension.

[1000] Non-limiting examples of skin disease include: wound healing, alopecia, wrinkles, senile lentigo, skin thinning, xeroderma pigmentosum, and dyskeratosis congenita.

[1001] Non-limiting examples of progeria disease include: progeria and Hutchinson-Gilford Progeria Syndrome.

[1002] Non-limiting examples of fragility disease include: frailty, responsiveness to vaccination, osteoporosis, and sarcopenia.

[1003] In some embodiments of any of the aging-related disease or condition described herein, the aging-related disease or condition is selected from the group of: age-related macular degeneration, osteoarthritis, adipose atrophy, idiopathic pulmonary fibrosis, kidney transplant failure, liver fibrosis, loss of bone mass, sarcopenia, age-associated loss of lung tissue elasticity, osteoporosis, age-associated renal dysfunction, and chemical-induced renal dysfunction.

[1004] In some embodiments of any of the aging-related disease or condition described herein, the aging-related disease or condition is type-2 diabetes or atherosclerosis.

[1005] In some embodiments of these methods, the administering results in a decrease (e.g., at least a 5% decrease, at least a 10% decrease, at least a 15% decrease, at least a 20% decrease, at least a 25% decrease, at least a 30% decrease, at least a 35% decrease, at least a 40% decrease, at least a 45% decrease, at least a 50% decrease, at least a 55% decrease, at least a 60% decrease, at least a 65% decrease, at least a 70% decrease, at least a 75% decrease, at least a 80% decrease, at least a 85% decrease, at least a 90% decrease, or at least a 95% decrease, or about a 10% decrease to about a 99% decrease (or any of the subranges of this range described herein)) in the number of senescent cells in a target tissue in the subject, e.g., as compared to the number of senescent cells in the target tissue in the subject prior to treatment. In some embodiments of these methods, the target tissue in the subject can be one or more of an adipose tissue, pancreatic tissue, liver tissue, lung tissue, vasculature, bone tissue, central nervous system (CNS) tissue, eye tissue, skin tissue, muscle tissue, and secondary lympho-organ tissue.

[1006] In some embodiments of these methods, the administering results in an increase (e.g., at least a 5% increase, at least a 10% increase, at least a 15% increase, at least a 20% increase, at least a 25% increase, at least a 30% increase, at least a 35% increase, at least a 40% increase, at least a 45% increase, at least a 50% increase, at least a 55% increase, at least a 60% increase, at least a 65% increase, at least a 70% increase, at least a 75% increase, at least a 80% increase, at least a 85% increase, at least a 90% increase, at least a 95% increase, or at least a 99% increase, or about a 10% increase to about a 500% increase (or any of the subranges of this range described herein)) in the levels of IFN-γ, a cytotoxic granule granzyme, and/or perform in the subject, as compared to the levels in a subject prior to treatment or a similar control subject who has not received a treatment.

[1007] In some embodiments of these methods, the number of senescent cells in a target tissue (e.g. any of the target tissues described herein) can be determined by performing immunostaining on a biopsy sample. In some embodiments of these methods, the number of senescent cells in a target tissue (e.g. any of the target tissues described herein) can be observed indirectly through an improvement in one or more symptoms of an aging-related disease or condition (e.g. any of the symptoms of an aging-related disease or condition described herein) in a subject.

### Senescent Cells

[1008] Senescent cells display important and unique properties which include changes in morphology, chromatin organization, gene expression, and metabolism. There are several biochemical and functional properties associated with cellular senescence, such as (i) increased expression of p16 and p21, inhibitors of cyclin-dependent kinases, (ii) presence of senescence-associated β-galactosidase, a marker of lysosomal activity, (iii) appearance of senescence-associated heterochromatin foci and downregulation of lamin B1 levels, (iv) resistance to apoptosis caused by an increased expression of anti-apoptotic BCL-family protein, and (v) upregulation of CD26 (DPP4), CD36 (Scavenger receptor), forkhead box 4 (FOXO4), and secretory carrier membrane protein 4 (SCAMP4). Senescent cells also express an inflammatory signature, the so-called senescence-associated secretory phenotype (SASP). Through SASP, the senescent cells produce a wide range of inflammatory cytokines (IL-6, IL-8), growth factors (TGF-β), chemokines (CCL-2), and matrix metalloproteinases (MMP-3, MMP-9) that operate in a cell-autonomous manner to reinforce senescence (autocrine effects) and communicate with and modify the microenvironment (paracrine effects). SASP factors can contribute to tumor suppression by triggering senescence surveillance, an immune-mediated clearance of senescent cells. However, chronic inflammation is also a known driver of tumorigenesis, and accumulating evidence indicates that chronic SASP can also boost cancer metastasis and aging-related diseases.

[1009] The secretion profile of senescent cells is context dependent. For instance, the mitochondrial dysfunction-associated senescence (MiDAS), induced by different mitochondrial dysfunction in human fibroblasts, led to the appearance of a SASP that was deficient in IL-1-dependent inflammatory factors. A decrease in the NAD+/NADH ratio activated AMPK signaling which induced MiDAS through the activation of p53. As a result, p53 inhibited NF-κB signaling which is a crucial inducer of pro-inflammatory SASP. In contrast, the cellular senescence caused by persistent DNA damage in human cells induced an inflammatory SASP, which was dependent on the activation of ataxia-telangiectasia mutated (ATM) kinase but not on that of p53. In particular, the expression and secretion levels of IL-6 and IL-8 were increased. It was also demonstrated that cellular senescence caused by the ectopic expression p16INK4a and p21CIP1 induced the senescent phenotype in human fibroblasts without an inflammatory SASP indicating that the growth arrest itself did not stimulate SASP.

[1010] One of the most defining characteristics of senescence is stable growth arrest. This is achieved by two important pathways, the p16/Rb and the p53/p21, both of which are central in tumor suppression. DNA damage results in: (1) high deposition of γH2Ax (histone coding gene) and 53BP1 (involved in DNA damage response) in chromatin: this leads to activation of a kinase cascade eventually resulting in p53 activation, and (2) activation of p16INK4a and ARF (both encoded by CDKN2A) and P15INK4b (encoded by CDKN2B): p53 induces transcription of cyclin-dependent kinase inhibitor (p21) and along with both p16INK4a and p15INK4b block genes for cell cycle progression (CDK4 and CDK6). This eventually leads to hypophosphorylation of Retinoblastoma protein (Rb) and cell cycle arrest at the G1 phase.

[1011] Selectively killing senescent cells has been shown to significantly improve the health span of mice in the context of normal aging and ameliorates the consequences of age-related disease or cancer therapy (Ovadya, J Clin Invest. 128(4):1247-1254, 2018). In nature, the senescent cells are normally removed by the innate immune cells. Induction of senescence not only prevents the potential proliferation and transformation of damaged/altered cells, but also favors tissue repair through the production of SASP factors that function as chemoattractants mainly for Natural Killer (NK) cells (such as IL-15 and CCL2) and macrophages (such as CFS-1 and CCL2). These innate immune cells mediate the immunosurveillance mechanism for eliminating stressed cells. Senescent cells usually up-regulate the NK-cell activating receptor NKG2D and DNAM1 ligands, which belong to a family of stress-inducible ligands: an important component of the frontline immune defense against infectious diseases and malignancies. Upon receptor activation, NK cells can then specifically induce the death of senescent cells through their cytolytic machinery. A role for NK cells in the immune surveillance of senescent cells has been pointed out in liver fibrosis (Sagiv, Oncogene 32(15): 1971-1977, 2013), hepatocellular carcinoma (Iannello, J Exp Med 210(10): 2057-2069, 2013), multiple myeloma (Soriani, Blood 113(15): 3503-3511, 2009), and glioma cells stressed by dysfunction of the mevalonate pathway (Ciaglia, Int J Cancer 142(1): 176-190, 2018). Endometrial cells undergo acute cellular senescence and do not differentiate into decidual cells. The differentiated decidual cells secrete IL-15 and thereby recruit uterine NK cells to target and eliminate the undifferentiated senescent cells thus helping to re-model and rejuvenate the endometrium (Brighton, Elife 6: e31274, 2017). With a similar mechanism, during liver fibrosis, p53-expressing senescent liver satellite cells skewed the polarization of resident Kupfer macrophages and freshly infiltrated macrophages toward the pro-inflammatory M1 phenotype, which display senolytic activity. F4/80+ macrophages have been shown to play a key role in the clearance of mouse uterine senescent cells to maintain postpartum uterine function.

[1012] Senescent cells recruit NK cells by mainly upregulating ligands to NKG2D (expressed on NK cells), chemokines, and other SASP factors. In vivo models of liver fibrosis have shown effective clearance of senescent cells by activated NK cells (Krizhanovsky, Cell 134(4): 657-667, 2008). Studies have described various models to study senescence including liver fibrosis (Krizhanovsky, Cell 134(4): 657-667, 2008), osteoarthritis (Xu, J Gerontol A Biol Sci Med Sci 72(6): 780-785, 2017), and Parkinson's disease (Chinta, Cell Rep 22(4): 930-940, 2018). Animal models for studying senescent cells are described in: Krizhanovsky, Cell 134(4): 657-667, 2008; Baker, Nature 479(7372): 232-236, 2011; Farr, Nat Med 23(9): 1072-1079, 2017; Bourgeois, FEBS Lett 592(12): 2083-2097, 2018; Xu, Nat Med 24(8): 1246-1256, 2018).

Methods of Improving the Texture and/or Appearance of Skin and/or Hair

[1013] Also provided herein are methods of improving the texture and/or appearance of skin and/or hair in a subject in need thereof over a period of time (e.g. any of the periods of time described herein) that include administering to the subject a therapeutically effective amount of one or more natural killer (NK) cell activating agent(s) (e.g. any of the NK cell activating agent(s) described herein or known in the art).

[1014] Also provided herein are methods of improving the texture and/or appearance of skin and/or hair in a subject in need thereof over a period of time (e.g. any of the periods of time described herein) that include administering to the subject a therapeutically effective number of activated NK cells (e.g. any of the activated NK cells described herein or known in the art).

[1015] Some embodiments of these methods further include: obtaining a resting NK cell; and contacting the resting NK cell in vitro in a liquid culture medium including one or more NK cell activating agent(s), where the contacting results in the generation of the activated NK cells that are subsequently administered to the subject. In some examples of these methods, the resting NK cell is an autologous NK cell obtained from the subject. In some examples of these methods, the resting NK cell is a haploidentical NK cell obtained from the subject. In some examples of these methods, the resting NK cell is an allogeneic resting NK cell. In some examples of these methods, the resting NK cell is an artificial NK cell. In some examples of any of these methods, the resting NK cell is a genetically-engineered NK cell carrying a chimeric antigen receptor or recombinant T cell receptor.

[1016] In some examples of these methods, the liquid culture medium is a serum-free liquid culture medium. In some embodiments of any of the methods described herein, the liquid culture medium is a chemically-defined liquid culture medium. Some examples of these methods further include isolating the activated NK cells (and further administering a therapeutically effective amount of the activated NK cells to a subject, e.g., any of the subjects described herein). In some embodiments of these methods, the contacting step is performed for a period of about 2 hours to about 20 days (or any of the subranges of this range described herein).

[1017] In some embodiments of these methods, the method provides for an improvement in the texture and/or appearance of skin of the subject over the period of time (e.g. any of periods of time described herein).

[1018] In some embodiments of these methods, the method results in a decrease (e.g., at least a 5% decrease, at least a 10% decrease, at least a 15% decrease, at least a 20% decrease, at least a 25% decrease, at least a 30% decrease, at least a 35% decrease, at least a 40% decrease, at least a 45% decrease, at least a 50% decrease, at least a 55% decrease, at least a 60% decrease, at least a 65% decrease, at least a 70% decrease, at least a 75% decrease, at least a 80% decrease, at least a 85% decrease, at least a 90% decrease, or at least a 95% decrease, or about a 5% decrease to about a 99% decrease (or any of the subranges of this range described herein)) in the rate of formation of wrinkles in the skin of the subject over the period of time (e.g., any of the periods of time described herein), e.g., as compared to the rate of formulation of wrinkles in the subject prior to treatment or the rate of formulation of wrinkles in a similar subject not receiving a treatment.

[1019] In some embodiments of these methods, the method results in an improvement in the coloration of skin of the subject over the period of time (e.g. any of the periods of time described herein).

[1020] In some embodiments of these methods, the method results in an improvement in the texture of skin of the subject over the period of time (e.g. any of the periods of time described herein).

[1021] In some embodiments of these methods, the method provides for an improvement in the texture and/or appearance of hair of the subject over the period of time (e.g. any of the periods of time described herein).

[1022] In some embodiments of these methods, the method results in a decrease (e.g., at least a 5% decrease, at least a 10% decrease, at least a 15% decrease, at least a 20% decrease, at least a 25% decrease, at least a 30% decrease, at least a 35% decrease, at least a 40% decrease, at least a 45% decrease, at least a 50% decrease, at least a 55% decrease, at least a 60% decrease, at least a 65% decrease, at least a 70% decrease, at least a 75% decrease, at least a 80% decrease, at least a 85% decrease, at least a 90% decrease, or at least a 95% decrease, or about a 5% decrease to about a 99% decrease (or any of the subranges of this range described herein)) in the rate of formation of gray hair in the subject over the period of time (e.g. any of the range of time period described herein), e.g., as compared to the rate of formulation of gray hair in the subject prior to treatment or the rate of formulation of gray hair in a similar subject not receiving a treatment.

[1023] In some embodiments of these methods, the method results in a decrease (e.g., at least a 5% decrease, at least a 10% decrease, at least a 15% decrease, at least a 20% decrease, at least a 25% decrease, at least a 30% decrease, at least a 35% decrease, at least a 40% decrease, at least a 45% decrease, at least a 50% decrease, at least a 55% decrease, at least a 60% decrease, at least a 65% decrease, at least a 70% decrease, at least a 75% decrease, at least a 80% decrease, at least a 85% decrease, at least a 90% decrease, or at least a 95% decrease, or about a 5% decrease to about a 99% decrease (or any of the subranges of this range described herein)) in the number of gray hairs of the subject over the period of time (e.g. any of the periods of time described herein), e.g., as compared to the number of gray hairs in the subject prior to treatment or the rate of formation of gray hairs in a similar subject not receiving a treatment.

[1024] In some embodiments of these methods, the method results in a decrease (e.g., at least a 5% decrease, at least a 10% decrease, at least a 15% decrease, at least a 20% decrease, at least a 25% decrease, at least a 30% decrease, at least a 35% decrease, at least a 40% decrease, at least a 45% decrease, at least a 50% decrease, at least a 55% decrease, at least a 60% decrease, at least a 65% decrease, at least a 70% decrease, at least a 75% decrease, at least a 80% decrease, at least a 85% decrease, at least a 90% decrease, or at least a 95% decrease, or about a 5% decrease to about a 99% decrease (or any of the subranges of this range described herein)) in the rate of hair loss in the subject over the period of time (e.g., any of the periods of time described herein), e.g., as compared to the rate of hair loss in the subject prior to treatment or the rate of hair loss in a similar subject not receiving a treatment.

[1025] In some embodiments of these methods, the method results in an improvement in the texture of hair of the subject over the period of time (e.g. any of the periods of time described herein).

[1026] In some embodiments of these methods, the method results in a decrease (e.g., at least a 5% decrease, at least a 10% decrease, at least a 15% decrease, at least a 20% decrease, at least a 25% decrease, at least a 30% decrease, at least a 35% decrease, at least a 40% decrease, at least a 45% decrease, at least a 50% decrease, at least a 55% decrease, at least a 60% decrease, at least a 65% decrease, at least a 70% decrease, at least a 75% decrease, at least a 80% decrease, at least a 85% decrease, at least a 90% decrease, or at least a 95% decrease, or about a 5% decrease to about a 99% decrease (or any of the subranges of this range described herein)) in the number of senescent dermal fibroblasts in the skin of the subject over the period of time (e.g., any of the periods of time described herein), e.g., as compared to the number of senescent dermal cells in the subject prior to treatment or the number of senescent dermal cells in a similar subject not receiving a treatment.

[1027] In some embodiments of these methods, improvement in the texture and/or appearance of skin of the subject over the period of time (e.g. any of the periods of time described herein) can be assessed by any method described herein or known in the art, including inspecting the presence, size and shape of skin lesions, skin color and pigmentation, skin moisture, temperature, elasticity, and vascularity.

[1028] In some embodiments of these methods, improvement in the texture and/or appearance of hair of the subject over the period of time (e.g., any of periods of time described herein) can be assessed by any method described herein or known in the art,

[1029] In some embodiments of these methods, the period of time is, e.g., one month to ten years, one month to nine years, one month to eight years, one month to seven years, one month to six years, one month to five years, one month to four years, one month to three years, one month to two years, one month to eighteen months, one month to twelve months, one month to ten months, one month to eight months, one month to six months, one month to four months, one month to two months, one month to six weeks, six weeks to ten years, six weeks to nine years, six weeks to eight years, six weeks to seven years, six weeks to six years, six weeks to five years, six weeks to four years, six weeks to three years, six weeks to two years, six weeks to eighteen months, six weeks to twelve months, six weeks to ten months, six weeks to eight months, six weeks to six months, six weeks to four months, six weeks to two months, two months to ten years, two months to nine years, two months to eight years, two months to seven years, two months to six years, two months to five years, two months to four years, two months to three years, two months to two years, two months to eighteen months, two months to twelve months, two months to ten months, two months to eight months, two months to six months, two months to four months, four months to ten years, four months to nine years, four months to eight years, four months to seven years, four months to six years, four months to five years, four months to four years, four months to three years, four months to two years, four months to eighteen months, four months to twelve months, four months to ten months, four months to eight months, four months to six months, six months to ten years, six months to nine years, six months to eight years, six months to seven years, six months to six years, six months to five years, six months to four years, six months to three years, six months to two years, six months to eighteen months, six months to twelve months, six months to ten months, six months to eight months, eight months to ten years, eight months to nine years, eight months to eight years, eight months to seven years, eight months to six years, eight months to five years, eight months to four years, eight months to three years, eight months to two years, months to eighteen months, eight months to twelve months, eight months to ten months, ten months to ten years, ten months to nine years, ten months to eight years, ten months to seven years, ten months to six years, ten months to five years, ten months to four years, ten months to three years, ten months to two years, ten months to eighteen months, ten months to twelve months, twelve months to ten years, twelve months to nine years, twelve months to eight years, twelve months to seven years, twelve months to six years, twelve months to five years, twelve months to four years, twelve months to three years, twelve months to two years, twelve months to eighteen months, eighteen months to ten years, eighteen months to nine years, eighteen months to eight years, eighteen months to seven years, eighteen months to six years, eighteen months to five years, eighteen months to four years, eighteen months to three years, eighteen months to two years, two years to ten years, two years to nine years, two years to eight years, two years to seven years, two years to six years, two years to five years, two years to four years, two years to three years, three years to ten years, three years to nine years, three years to eight years, three years to seven years, three years to six years, three years to five years, three years to four years, four years to ten years, four years to nine years, four years to eight years, four years to seven years, four years to six years, four years to five years, five years to ten years, five years to nine years, five years to eight years, five years to seven years, five years to six years, six years to ten years, six years to nine years, six years to eight years, six years to seven years, seven years to ten years, seven years to nine years, seven years to eight years, eight years to ten years, eight years to nine years, or nine years to ten years.

[1030] In some embodiments of these methods, the age of the subject is between about 30 to about 35, about 35 to about 40, about 40 to about 45, about 45 to about 50, about 50 to about 55, about 55 to about 60, about 60 to about 65, about 65 to about 70, about 70 to about 75, about 75 to about 80, about 80 to about 85, about 85 to about 90, about 90 to about 95, about 95 to about 100, about 100 to about 105, about 105 to about 110, about 110 to about 115, or about 115 to about 120.

### Methods of Assisting in the Treatment of Obesity in a Subject

[1031] Provided herein are methods of assisting in the treatment of obesity in a subject in need thereof over a period of time (e.g. any of the range of time period described herein), that include administering to the subject a therapeutically effective amount of one or more natural killer (NK) cell activating agent(s) (e.g. any of the NK cell activating agent(s) described herein or known in the art).

[1032] Also provided herein are methods of assisting in the treatment of obesity in a subject in need thereof over a period of time (e.g. any of the range of time period described herein) that include administering to the subject a therapeutically effective number of activated NK cells (e.g. any of the activated NK cells described herein or known in the art).

[1033] Some embodiments of these methods further include: obtaining a resting NK cell; and contacting the resting NK cell in vitro in a liquid culture medium including one or more NK cell activating agent(s), where the contacting results in the generation of the activated NK cells that are subsequently administered to the subject. In some examples of these methods, the resting NK cell is an autologous NK cell obtained from the subject. In some examples of these methods, the resting NK cell is a haploidentical NK cell obtained from the subject. In some examples of these methods, the resting NK cell is an allogeneic resting NK cell. In some examples of these methods, the resting NK cell is an artificial NK cell. In some examples of any of these methods, the resting NK cell is a genetically-engineered NK cell carrying a chimeric antigen receptor or recombinant T cell receptor.

[1034] In some examples of these methods, the liquid culture medium is a serum-free liquid culture medium. In some embodiments of any of the methods described herein, the liquid culture medium is a chemically-defined liquid culture medium. Some examples of these methods further include isolating the activated NK cells (and further administering a therapeutically effective amount of the activated NK cells to a subject, e.g., any of the subjects described herein). In some embodiments of these methods, the contacting step is performed for a period of about 2 hours to about 20 days (or any of the subranges of this range described herein).

[1035] In some embodiments of these methods, the method results in a decrease (e.g., at least a 5% decrease, at least a 10% decrease, at least a 15% decrease, at least a 20% decrease, at least a 25% decrease, at least a 30% decrease, at least a 35% decrease, at least a 40% decrease, at least a 45% decrease, at least a 50% decrease, at least a 55% decrease, at least a 60% decrease, at least a 65% decrease, at least a 70% decrease, at least a 75% decrease, at least a 80% decrease, at least a 85% decrease, at least a 90% decrease, or at least a 95% decrease, or about a 5% decrease to about a 99% decrease (or any of the subranges of this range described herein)) in the mass of the subject over the period of time (e.g. any of the periods of time described herein), e.g., as compared to the mass of the subject prior to treatment.

[1036] In some embodiments of these methods, the method results in a decrease (e.g., at least a 5% decrease, at least a 10% decrease, at least a 15% decrease, at least a 20% decrease, at least a 25% decrease, at least a 30% decrease, at least a 35% decrease, at least a 40% decrease, at least a 45% decrease, at least a 50% decrease, at least a 55% decrease, at least a 60% decrease, at least a 65% decrease, at least a 70% decrease, at least a 75% decrease, at least a 80% decrease, at least a 85% decrease, at least a 90% decrease, or at least a 95% decrease, or about a 5% decrease to about a 99% decrease (or any of the subranges of this range described herein)) in the body mass index (BMI) of the subject over the period of time (e.g. any of periods of time described herein), e.g., as compared to the BMI of the subject prior to treatment.

[1037] In some embodiments of these methods, the method results in a decrease (e.g., at least a 5% decrease, at least a 10% decrease, at least a 15% decrease, at least a 20% decrease, at least a 25% decrease, at least a 30% decrease, at least a 35% decrease, at least a 40% decrease, at least a 45% decrease, at least a 50% decrease, at least a 55% decrease, at least a 60% decrease, at least a 65% decrease, at least a 70% decrease, at least a 75% decrease, at least a 80% decrease, at least a 85% decrease, at least a 90% decrease, or at least a 95% decrease, or about a 5% decrease to about a 99% decrease (or any of the subranges of this range described herein)) in the rate of progression from pre-diabetes to type 2 diabetes in the subject, e.g., as compared to the rate of progression from pre-diabetes to type 2 diabetes in the subject prior to treatment or the rate of progression from pre-diabetes to type 2 diabetes in a similar subject not receiving a treatment.

[1038] In some embodiments of these methods, the method results in a decrease (e.g., at least a 5% decrease, at least a 10% decrease, at least a 15% decrease, at least a 20% decrease, at least a 25% decrease, at least a 30% decrease, at least a 35% decrease, at least a 40% decrease, at least a 45% decrease, at least a 50% decrease, at least a 55% decrease, at least a 60% decrease, at least a 65% decrease, at least a 70% decrease, at least a 75% decrease, at least a 80% decrease, at least a 85% decrease, at least a 90% decrease, or at least a 95% decrease, or about a 5% decrease to about a 99% decrease (or any of the subranges of this range described herein)) in fasting serum glucose level in the subject, e.g., as compared to the fasting serum glucose level in the subject prior to treatment.

[1039] In some embodiments of these methods, the method results in an increase (e.g., at least a 5% increase, at least a 10% increase, at least a 15% increase, at least a 20% increase, at least a 25% increase, at least a 30% increase, at least a 35% increase, at least a 40% increase, at least a 45% increase, at least a 50% increase, at least a 55% increase, at least a 60% increase, at least a 65% increase, at least a 70% increase, at least a 75% increase, at least a 80% increase, at least a 85% increase, at least a 90% increase, at least a 95% increase, or at least a 99% increase, or about a 10% increase to about a 500% increase (or any of the subranges of this range described herein) in insulin sensitivity in the subject, e.g., as compared to the insulin sensitivity in the subject prior to treatment.

[1040] In some embodiments of these methods, the method results in a decrease (e.g., at least a 5% decrease, at least a 10% decrease, at least a 15% decrease, at least a 20% decrease, at least a 25% decrease, at least a 30% decrease, at least a 35% decrease, at least a 40% decrease, at least a 45% decrease, at least a 50% decrease, at least a 55% decrease, at least a 60% decrease, at least a 65% decrease, at least a 70% decrease, at least a 75% decrease, at least a 80% decrease, at least a 85% decrease, at least a 90% decrease, or at least a 95% decrease, or about a 5% decrease to about a 99% decrease (or any of the subranges of this range described herein)) in the severity of atherosclerosis in the subject, e.g., as compared to the severity of atherosclerosis in the subject prior to treatment.

[1041] In some embodiments of these methods, treatment of obesity in the subject over the period of time (e.g. any of the periods of time described herein) can be assessed by any method described herein or known in the art, including, e.g., measurement of body weight and/or body dimensions, total body fat, total or regional adiposity, and body mass index (BMI).

[1042] In some embodiments of these methods, the response of a subject to the treatment can be monitored by determining fasting serum glucose level or glucose tolerance according to standard techniques. In some embodiments of these methods, insulin sensitivity can be measured using any method described herein or known in the art, including hyperinsulinemic euglycemic clamp and intravenous glucose tolerance test, homeostasis model assessment (HOMA), and quantitative insulin sensitivity check index (QUICKI).

[1043] In some embodiments of these methods, the severity of atherosclerosis in the subject can be measured using any method described herein or known in the art, including cardiac catheterization, Doppler sonography, blood pressure comparison, MUGA/radionuclide angiography, Thallium/myocardial perfusion scan, and computerized tomography.

[1044] In some embodiments of these methods, the period of time is one month to ten years (or any of the subranges of this range described herein).

[1045] In some embodiments of these methods, the age range for the subject is between about 1 to about 5, about 5 to about 10, about 10 to about 15, about 15 to about 20, about 20 to about 25, about 25 to about 30, about 30 to about 35, about 35 to about 40, about 40 to about 45, about 45 to about 50, about 50 to about 55, about 55 to about 60, about 60 to about 65, about 65 to about 70, about 70 to about 75, about 75 to about 80, about 80 to about 85, about 85 to about 90, about 90 to about 95, about 95 to about 100, about 100 to about 105, about 105 to about 110, about 110 to about 115, or about 115 to about 120.

### Additional Therapeutic Agents

[1046] Some embodiments of any of the methods described herein can further include administering to a subject (e.g., any of the subjects described herein) a therapeutically effective amount of one or more additional therapeutic agents. The one or more additional therapeutic agents can be administered to the subject at substantially the same time as the NK cell activating agent(s) or activated NK cells (e.g., administered as a single formulation or two or more formulations to the subject). In some embodiments, one or more additional therapeutic agents can be administered to the subject prior to administration of the NK cell activating agent(s) or activated NK cells. In some embodiments, one or more additional therapeutic agents can be administered to the subject after administration of the NK cell activating agent(s) or activated NK cells to the subject.

[1047] Non-limiting examples of additional therapeutic agents include: anti-cancer drugs, activating receptor agonists, immune checkpoint inhibitors, agents for blocking HLA-specific inhibitory receptors, Glucogen Synthase Kinase (GSK) 3 inhibitors, and antibodies.

[1048] Non-limiting examples of anticancer drugs include antimetabolic drugs (e.g., 5-fluorouracil (5-FU), 6-mercaptopurine (6-MP), capecitabine, cytarabine, floxuridine, fludarabine, gemcitabine, hydroxycarbamide, methotrexate, 6-thioguanine, cladribine, nelarabine, pentostatin, or pemetrexed), plant alkaloids (e.g., vinblastine, vincristine, vindesine, camptothecin, 9-methoxycamptothecin, coronaridine, taxol, naucleaorals, diprenylated indole alkaloid, montamine, schischkiniin, protoberberine, berberine, sanguinarine, chelerythrine, chelidonine, liriodenine, clivorine, β-carboline, antofine, tylophorine, cryptolepine, neocryptolepine, corynoline, sampangine, carbazole, crinamine, montanine, ellipticine, paclitaxel, docetaxel, etoposide, tenisopide, irinotecan, topotecan, or acridone alkaloids), proteasome inhibitors (e.g., lactacystin, disulfiram, epigallocatechin-3-gallate, marizomib (salinosporamide A), oprozomib (ONX-0912), delanzomib (CEP-18770), epoxomicin, MG132, beta-hydroxy beta-methylbutyrate, bortezomib, carfilzomib, or ixazomib), antitumor antibiotics (e.g., doxorubicin, daunorubicin, epirubicin, mitoxantrone, idarubicin, actinomycin, plicamycin, mitomycin, or bleomycin), histone deacetylase inhibitors (e.g., vorinostat, panobinostat, belinostat, givinostat, abexinostat, depsipeptide, entinostat, phenyl butyrate, valproic acid, trichostatin A, dacinostat, mocetinostat, pracinostat, nicotinamide, cambinol, tenovin 1, tenovin 6, sirtinol, ricolinostat, tefinostat, kevetrin, quisinostat, resminostat, tacedinaline, chidamide, or selisistat), tyrosine kinase inhibitors (e.g., axitinib, dasatinib, encorafinib, erlotinib, imatinib, nilotinib, pazopanib, and sunitinib), and chemotherapeutic agents (e.g., all-trans retinoic acid, azacitidine, azathioprine, doxifluridine, epothilone, hydroxyurea, imatinib, teniposide, tioguanine, valrubicin, vemurafenib, and lenalidomide). Additional examples of chemotherapeutic agents include alkylating agents, e.g., mechlorethamine, cyclophosphamide, chlorambucil, melphalan, ifosfamide, thiotepa, hexamethylmelamine, busulfan, altretamine, procarbazine, dacarbazine, temozolomide, carmustine, lumustine, streptozocin, carboplatin, cisplatin, and oxaliplatin.

[1049] Non-limiting examples of activating receptor agonists include any agonists for activating receptors which activate and enhance the cytotoxicity of NK cells, including anti-CD16 antibodies (e.g., anti-CD16/CD30 bispecific monoclonal antibody (BiMAb)) and Fc-based fusion proteins. Non-limiting examples of checkpoint inhibitors include anti-PD-1 antibodies (e.g., MEDI0680), anti-PD-L1 antibodies (e.g., BCD-135, BGB-A333, CBT-502, CK-301, CS1001, FAZ053, KN035, MDX-1105, MSB2311, SHR-1316, anti-PD-L1/CTLA-4 bispecific antibody KN046, anti-PD-L1/TGFβRII fusion protein M7824, anti-PD-L1/TIM-3 bispecific antibody LY3415244, atezolizumab, or avelumab), anti-TIM3 antibodies (e.g., TSR-022, Sym023, or MBG453) and anti-CTLA-4 antibodies (e.g., AGEN1884, MK-1308, or an anti-CTLA-4/OX40 bispecific antibody ATOR-1015). Non-limiting examples of agents for blocking HLA-specific inhibitory receptors include monalizumab (e.g., an anti-HLA-E NKG2A inhibitory receptor monoclonal antibody). Non-limiting examples of GSK3 inhibitor include tideglusib or CHIR99021. Non-limiting examples of antibodies that can be used as additional therapeutic agents include anti-CD26 antibodies (e.g., YS110), anti-CD36 antibodies, and any other antibody or antibody construct that can bind to and activate an Fc receptor (e.g., CD16) on a NK cell. In some embodiments, an additional therapeutic agent can be insulin or metformin.

### EXAMPLES

[1050] The invention is further described in the following examples, which do not limit the scope of the invention described in the claims.

### Example 1: Immunostimulation in C57BL/6 Mice Using a Multi-Chain Polypeptide

### Materials and Methods

[1051] An exemplary multi-chain polypeptide (a type A multi-chain polypeptide described herein) was generated that includes a first polypeptide and a second polypeptide, where the first polypeptide is a soluble fusion of two TGFβRII domains, a human tissue factor 219 fragment, and a human IL-15, and the second polypeptide is a soluble fusion of two TGFβRII domains and the sushi domain of human IL-15Rα chain.

### Results

### Immunostimulation in C57BL/6 Mice

[1052] Wild type C57BL/6 mice were treated subcutaneously with either a control PBS solution or with the multi-chain polypeptide at a dosage of 0.3 mg/kg, 1 mg/kg, 3 mg/kg, or 10 mg/kg, respectively. Four days after treatment, spleen weight and the percentages of various immune cell types present in the spleen were evaluated. Specifically, single splenocyte suspensions were generated and stained with fluorochrome-conjugated antibodies including anti-CD4, anti-CD8, anti-NK1.1, and anti-CD19. The percentages of CD4⁺ T cells, CD8⁺ T cells, Natural Killer (NK) cells, and CD19⁺ B cells present in the spleen of mice treated with either the control solution or the multi-chain polypeptide were evaluated using flow cytometry. As shown in FIG. 1A, the spleen weight in mice treated with the multi-chain polypeptide increased with increasing dosage of the multi-chain polypeptide. Moreover, the spleen weight in mice treated with 1 mg/kg, 3 mg/kg, and 10 mg/kg of the multi-chain polypeptide were significantly higher as compared to mice treated with the control solution, respectively. As shown in FIG. 1B, in the spleens of mice treated with the multi-chain polypeptide, the percentages of CD8⁺ T cells and NK cells both increased with increasing dosage of the multi-chain polypeptide. Specifically, the percentages of CD8⁺ T cells were higher in mice treated with 0.3 mg/kg, 3 mg/kg, and 10 mg/kg of the multi-chain polypeptide compared to control-treated mice, and the percentages of NK cells were higher in mice treated with 0.3 mg/kg, 1 mg/kg, 3 mg/kg, and 10 mg/kg of the multi-chain polypeptide compared to control-treated mice. These results demonstrate that the exemplary multi-chain polypeptide is able to stimulate immune cells in the spleen, in particular CD8⁺ T cells and NK cells.

### Pharmacokinetics

[1053] The pharmacokinetics of the exemplary multi-chain polypeptide were evaluated in wild type C57BL/6 mice. Mice were treated subcutaneously with the multi-chain polypeptide at a dosage of 3 mg/kg. Blood was collected at various time points via tail vein, and serum was prepared. The concentration of the multi-chain polypeptide in the serum was determined with ELISA. Briefly, the multi-chain polypeptide was captured using an anti-human tissue factor antibody, and detected using a biotinylated anti-human TGFβ receptor, a peroxidase conjugated streptavidin, and ABTS substrate. The results showed that the half-life of the exemplary multi-chain polypeptide was 12.66 hours.

### Immunostimulation Over Time in C57BL/6 Mice

[1054] To evaluate the effect of immunostimulation by the multi-chain polypeptide over time, mice were treated with a single dose of the multi-chain polypeptide at 3 mg/kg and the spleen weight and percentages of immune cell types present in the spleen were evaluated immediately upon treatment and at 16, 24, 48, 72, and 92 hours after treatment, using techniques described above. As shown in FIG. 2A, the spleen weight of mice treated with the multi-chain polypeptide increased at 48 hours after treatment, and continued to increase over the next 44 hours. Moreover, as shown in FIG. 2B, in the spleens of mice treated with the multi-chain polypeptide, the percentages of CD8⁺ T cells and NK cells both increased at 48 hours after treatment and continued to increase over the next 44 hours. These results further demonstrate that the exemplary multi-chain polypeptide is able to stimulate immune cells in the spleen, in particular CD8⁺ T cells and NK cells, over time.

### Increased Proliferation and Granzyme B Expression by CD8⁺ T Cells and NK Cells

[1055] To evaluate the proliferation and cytotoxic potential of the immune cells induced by the multi-chain polypeptide, mice were treated with a single dose of the multi-chain polypeptide at 3 mg/kg, and the spleens of these mice were evaluated immediately after, and at 16, 24, 48, 72, and 92 hours after treatment. Briefly, single splenocyte suspensions were generated and stained with fluorochrome-conjugated antibodies for the various cell types including anti-CD4, anti-CD8, anti-NK1.1, and anti-CD19, and with an anti-Ki67 antibody (i.e. a cell proliferation marker) and an anti-Granzyme B antibody (i.e. a cytotoxic marker). The mean fluorescent intensity (MFI) of Ki67 and Granzyme B for each immune cell type was analyzed by flow cytometry. As shown in FIGS. 3A and 3B, the expression of Ki67 and Granzyme B by NK cells showed an increase at 24 hours as well as each time point evaluated thereafter as compared to immediately after treatment (0 hours). Moreover, the expression of Ki67 and Granzyme B by CD8⁺ T cells showed an increase at 48 hours as well as each time point evaluated thereafter as compared to immediately after treatment (0 hours). As such, a single dose of the multi-chain polypeptide resulted in proliferation of CD8⁺ T cells and NK cells for up to at least 4 days post-treatment.

[1056] These results demonstrate that the multi-chain polypeptide not only increased the number of CD8⁺ T cells and NK cells in the spleen, but also enhanced the proliferation and cytotoxicity of these cells.

### Cytotoxicity Against Tumor Cells

[1057] Next, the cytotoxicity of the splenocytes activated by the multi-chain polypeptide against tumor cells were evaluated in C57BL/6 mice. Mouse Moloney leukemia cells (Yac-1) were labeled with CellTrace Violet and used as tumor target cells. C57BL/6 mice were treated with a single dose of the multi-chain polypeptide at 3 mg/kg, and splenocytes were prepared at various time points thereafter and used as effector cells. The target tumor cells were mixed with the effector cells at an effector:target (E:T) ratio of 10:1, and incubated at 37° C. for 20 hours. Target cell viability was assessed by analyzing Propidium Iodide (PI)-positive, violet-labeled Yac-1 cells using flow cytometry. The percentage of Yac-1 tumor inhibition was calculated using the formula:

Percentage of Yac-1 tumor inhibition=(1−viable Yac-1 cell number in experimental sample/viable Yac-1 cell number in the sample without splenocytes)×100

[1058] As shown in FIG. 4, splenocytes from mice after 24-hour or more treatment with the multi-chain polypeptide showed increased cytotoxicity against Yac-1 cells as compared to the splenocytes from untreated mice.

### Example 2: Immunostimulation in C57BL/6 Mice Using a High Fat Diet-Based Type-2 Diabetes Mouse Model

### Materials and Methods

[1059] TGFRt15-TGFRs is a multi-chain chimeric polypeptide (a type A multi-chain chimeric polypeptide described herein) that includes two TGFβ-binding domains which a soluble human TGFβRII dimer (aa24-159). 21t15-TGFRs is a multi-chain chimeric polypeptide (a type A multi-chain chimeric polypeptide described herein) that includes IL-21 and a TGFβ-binding domain. 3t28 is a chimeric polypeptide (a type B chimeric polypeptide described herein) that include two IL-2 polypeptides.

### Results

[1060] To evaluate the effect of TGFRt15-TGFRs, 2t2, and 21t15-TGFRs in treating Type-2 diabetes, a high fat diet-based Type-2 diabetes mouse model (B6.129P2-ApoE^{tm1Unc}/J from The Jackson Laboratory) was used. Mice were fed either a control diet or a high fat diet for 11 weeks. A subset of mice fed with the high fat diet were also treated with TGFRt15-TGFRs, 2t2, or 21t15-TGFRs. Mice fed the control diet, high fat diet, and mice fed with the high fat diet and treated with TGFRt15-TGFRs, 2t2, or 21t15-TGFRs were evaluated 4 days post-treatment. Briefly, single splenocyte suspensions were generated and stained with fluorochrome-conjugated antibodies including anti-CD4, anti-CD8, anti-NK1.1, and anti-CD19. The percentages of CD4⁺ T cells, CD8⁺ T cells, Natural Killer (NK) cells, and CD19⁺ B cells present in the spleen of mice in each group were evaluated using flow cytometry.

[1061] As shown in FIG. 5A, in mice fed a high fat diet, the percentage of NK cells in PBMCs was significantly increased after treatment with TGFRt15-TGFRs or 2t2 compared to untreated mice, but not after treatment with 21t15-TGFRs. Furthermore, the percentage of CD8⁺ T cells in PBMCs was significantly increased after treatment with TGFRt15-TGFRs, 2t2, or 21t15-TGFRs compared to untreated mice. Moreover, the proliferation of CD4⁺ T cells, CD8⁺ T cells, Natural Killer (NK) cells, and CD19⁺ B cells in PBMCs were also evaluated using an anti-Ki67 antibody. As shown in FIG. 5B, the number of proliferating NK cells, CD4⁺ T cells, and CD8⁺ T cells were significantly increased after treatment with TGFRt15-TGFRs, but not after treatment with 2t2 or 21t15-TGFRs.

[1062] To examine the effect of TGFRt15-TGFRs, 2t2 and 21t15-TGFRs on the appearance and texture of skin and hair in animals, mice were fed either a control or a high fat diet for 7 weeks, and a subset of the mice fed a high fat diet were also treated with TGFRt15-TGFRs, 2t2 or 21t15-TGFRs. One week post-treatment, the appearance of the mice was evaluated. Mice fed a high fat diet and untreated, or a high diet and treated with 21t15-TGFRs appeared ungroomed and ruffled, and had increased gray hair/hair loss as compared to mice fed a control diet (FIGS. 6A, 6B and 6E). Surprisingly, mice fed a high fat diet that received TGFRt15-TGFRs or 2t2 treatment appeared groomed and healthier (less gray hair/hair loss) (FIGS. 6C and 6D) as compared to mice fed a high fat diet that did not receive TGFRt15-TGFRs or 2t2 treatment (FIG. 6B). Specifically, TGFRt15-TGFRs or 2t2-treated mice showed superior skin and hair appearance and texture as compared to control mice. These results demonstrate that treatment with TGFRt15-TGFRs or 2t2 improves the appearance and texture of skin and hair in mammals.

[1063] Next, mice were fed either a control or high fat diet for 9 weeks, and a subset of the mice fed a high fat diet were treated with TGFRt15-TGFRs, 2t2, or 21t15-TGFRs. Four days post-treatment, the fasting body weight of mice in each group were measured. The fasting body weight of mice fed with the high fat diet and untreated, as well as mice fed with the high fat diet and treated with 21t15-TGFRs were significantly increased compared to mice fed a control diet. However, the fasting body weight of mice fed a high fat diet and treated with TGFRt15-TGFRs or 2t2 were decreased compared to the other two high fat diet groups mentioned above. The fasting body weight of the mice at the end of the study (9 weeks) is shown in FIG. 7.

[1064] To evaluate the fasting glucose levels in the mice of each group, mice were fed either a control or a high fat diet and were either untreated or treated with TGFRt15-TGFRs, 2t2, or 21t15-TGFRs on days 44, 59 and 73. The fasting blood glucose in the mice of each group were measured 4 days post-treatment. As shown in FIG. 8, after the second and third doses (on Days 59 and 73, respectively), the fasting blood glucose level was significantly reduced for mice fed a high fat diet and treated with 2t2 (red line) as compared to mice fed a high fat diet but untreated (yellow line). The fasting blood glucose level remained constant for mice fed a high fat diet and treated with TGFRt15-TGFRs (green line), whereas the fasting blood glucose level increased for mice fed a high fat diet and treated with 21t15-TGFRs (blue line).

### Example 3: Chemotherapy-Induced Senescent B16F10 Melanoma Cells Express NK Ligands

### Material and Methods

[1065] Cellular senescence in B16F10 melanoma cells was induced by treating the cells with docetaxel (7.5 μM, Sigma) for 3 days followed by recovery in complete media for 4 days. Cellular senescence was accessed by staining the cells with senescence-associated 3-galactosidase (SA β-gal). Briefly, B16F10 control and senescence cells (B16F10-SNC) were washed once with PBS, fixed with 0.5% glutaraldehyde (PBS (pH 7.2)), for 30 minutes. Cells were stained in X-gal solution (1 mg/mL X-gal, 0.12 mM K3Fe [CN]₆, 0.12 mM K4Fe[CN]₆, and 1 mM MgCl₂ in PBS at pH 6.0) overnight at 37° C., and were imaged using a Nikon optical light microscope.

### Results

[1066] Cellular senescence in B16F10 melanoma cells was induced using chemotherapy as described above. As shown in FIG. 9A, chemotherapy-induced senescent B16F10 cells (B16F10-SNC) were positive for SA β-gal staining, while the control B16F10 cells were not stained. Next, expression of senescence genes was analyzed using RT-qPCR with RNA isolated on day 0 or following senescence induction on days 4, 8, 12 and 16, respectively. The expression levels were normalized to control B16F10 cells. As shown in FIGS. 9B-9D, the expression of p21, IL6 and DPP4 were upregulated in RNA isolated from the senescent cells over the duration of the experiment. Moreover, as shown in FIGS. 9E and 9F, the expression of RATE1E and ULBP1 (NK activating receptor NKG2D ligands) were also induced in senescent cells, with the highest expression level being on day 16. These results demonstrate that the chemotherapy-induced senescent B16F10 cells are subjected to stronger cytotoxicity of activated NK cells than control B16F10 cells.

### Acquisition of Stem-Cell Properties in Chemotherapy-Induced Senescent B16F10 Melanoma Cells

[1067] To examine whether chemotherapy-induced senescent B16F10 melanoma cells acquired stem cell properties, a colony formation assay was performed. Briefly, 1000 cells/well were seeded on a six well plate, and the media was changed every third day. As shown in FIG. 10A (images taken at 100× magnification), after 5 weeks in culture the senescent cells were able to form colonies. To evaluate stem cell marker expression by the colonies, RNA was isolated from the colonies and the expression of Oct4 and Notch4 mRNA were determined by RT-qPCR. As compared to control B16F10 cells, chemotherapy-induced senescent B16F10 melanoma cells showed upregulation of Oct4 and Notch 4, which are cancer stem cell markers (FIGS. 10B and 10C). Moreover, cell surface expression of stem cell markers CD44, CD24 and CD133 were evaluated by staining with antibodies against CD44, CD24, and CD133 followed by flow cytometry. As shown in FIGS. 10D-10F, double positive populations (CD44⁺CD24⁺, CD44⁺CD133⁺, and CD24⁺CD133⁺) were increased in the chemotherapy induced senescence stem cells (B16F10-SNC-CSC) compared to control B16F10.

Chemotherapy-Induced Senescent (CIS) Melanoma Cells with Stem Cell Properties are More “Migratory” and “Invasive” than Control B16F10 Cells

[1068] The migratory properties of chemotherapy-induced senescent (CIS) melanoma cells with stem cell properties (B16F10-SNC-CSC) were analyzed using a migration assay. Briefly, control B16F10 cells and B16F10-SNC-CSC cells were plated on six well plates and wounded with a p20 pipette tip. Movement of cells were imaged at 0, 12, and 24 hours after. As shown in FIG. 11A, chemotherapy-induced senescent (CIS) melanoma cells with stem cell properties (B16F10-SNC-CSC) were more migratory in the in vitro migration assay, as compared to control B16F10 cells.

[1069] Next, the invasive properties of chemotherapy-induced senescent cells with stem cell properties (B16F10-SNC-CSC) were analyzed using an invasion assay. The invasion assay was carried out on 24-well transwell inserts coated with Matrigel. Briefly, 0.5×10⁶ control B16F10 cells and B16F10-SNC-CSC cells were seeded in serum-free media onto the upper chamber, and the lower chamber was filled with media supplemented with 10% FBS. After 16 hours of incubation, the cells on the upper surface of the filter were removed, and cells underneath the filter were fixed and stained with a 0.02% crystal violet solution. The number of cells were counted in three fields at 100× magnification. As shown in FIGS. 11B and 11C, chemotherapy-induced senescent cells with stem cell properties were more aggressive in invading the Matrigel coated membrane as compared to control B16F10 cells. These results demonstrate that chemotherapy-induced senescent B16F10 tumor cells are able to regain their proliferation capability, obtain stem-cell features, and have increased migratory abilities and invasiveness for metastasis.

Cytotoxic Activity of Mouse NK Cells on Chemotherapy-Induced Senescent Cells with Stem Cell Properties

[1070] To expand NK cells in vivo, C57BL/6 mice were injected subcutaneously with TGFRt15-TGFRs (10 mg/kg) for 4 days. The spleens from these mice were obtained and NK cells were purified using MACS Miltenyi column. The purified NK cells were then expanded in vitro with 2t2 (FIG. 12A).

[1071] To evaluate the cytotoxicity of the expanded NK cells, chemotherapy-induced senescent stem cells (B16F10-SNC-CSC) or control B16F10 cells were labelled with CellTrace violet and incubated with in vitro activated 2t2 mouse NK cells (isolated from spleen of C57BL/6 mice injected with 10 mg/kg TGFRt15-TGFRs for 4 days) at various E:T ratios for 16 hrs. The B16F10-SNC-CSC and control B16F10 cells were trypsinized, washed and re-suspended in complete media containing a Propidium Iodide (PI) solution, and cytotoxicity was accessed by flow cytometry. As shown in FIG. 12B, NK cells were more effective at killing chemotherapy-induced senescent cells with stem cell properties (B16F10-SNC-CSC), as compared to control B16F10 cells.

### Combination Treatment in Melanoma Mouse Model

[1072] The effect of TGFRt15-TGFRs in treating melanoma was evaluated in a mouse melanoma model. Briefly, 5×10⁵ B16F10 cells were injected subcutaneously into C57BL/6 mice. When the tumor volume reached ˜100 mm³, mice were treated with docetaxel (chemotherapy) (5 mg/kg) or TA99 (200 μg) either as a single agent or in combination every third day, and TGFRt15-TGFRs (3 mg/kg) was given once a week (FIG. 13A). Mice that received saline, docetaxel (chemotherapy)/TA99 alone, or TGFRt15-TGFRs alone were used as controls. Five mice were tested in each experimental and control group. Tumor volume was measured every third day. As shown in FIGS. 13B and 13C, combinations of TGFRt15-TGFRs with either chemotherapy or TA99 slowed down tumor progression as compared to mice treated with saline or mice treated with chemotherapy or TA99 alone in the syngeneic melanoma mouse model.

### Example 4: Chemotherapeutic Induction of Senescence in Human Pancreatic Cell Line SW1990

### Materials and Methods

[1073] β-Galactosidase Staining:

[1074] Confirmation of chemotherapy induced senescence was carried out by standard β-galactosidase staining at pH 6.0 using commercially available kit (Cell Signaling Technology) according to manufacturer's instructions. The following day, the staining solution was removed, and cells were washed with phosphate buffered saline, and 70% glycerol was added to the wells. The β-galactosidase positive cells will be stained blue, while control untreated cells will not stain.

[1075] Flow Cytometry:

[1076] One million control and senescent cells were obtained and stained using commercially available antibodies to surface markers of stem cells such as anti-CD44 and anti-CD24 antibodies (Biolegend) according to manufacturers' instructions. The cells were then washed and analyzed using the BD Celesta flow cytometer. Cells showing stem cell-like properties will be doubly positive for both CD44 and CD24.

[1077] Gene Expression Assay:

[1078] One million control and senescent cells were obtained and lysed using Trizol (Thermofisher), followed by RNA purification using an RNA isolation kit (Qiagen). The RNA was quantified and converted to cDNA using a Qiagen cDNA Quantitect kit. The cDNA was then used as a template for standard Taqman gene expression assays (Thermofisher) to quantify the relative abundance of senescent, stem cell markers as well as NK ligands.

[1079] NK Cell Cytotoxicity Assay:

[1080] NK cells were isolated from healthy human donors (n=2) using a commercially available NK isolation kit (Stem Cell), and were activated overnight using the cytokine fusion molecule 18t15-12s (100 nM). On the following day, NK cells were washed to remove cytokine molecules and mixed with either CellTrace Violet labelled control untreated tumor cells or chemotherapy-induced senescent tumor cells at an E:T ratio of 4:1 for 20 hours. On the following day, cells were trypsinized, and complete contents of each well were analyzed using flow cytometry and percent inhibition of cells was analyzed.

### Results

[1081] Senescence in the human pancreatic tumor cell line SW1990 was induced through treatment with chemotherapeutic drugs Abraxane (Celgene) and Gemcitabine (Sigma Aldrich) for 3 days at 2.5 μM and 6.25 μM, respectively. SW1990 cells that were untreated were used as controls. Media was changed after 3 days and cells were allowed to rest in the culture media for 4 days. As shown in FIG. 14, senescent cells treated with the chemotherapeutic drugs were positive for β-galactosidase staining (blue), while control cells were not stained. Senescent cells and control cells were evaluated for their expression of senescence and stem cell markers at 4 days, 11 days, and 22 days post-treatment. As shown in FIG. 14, senescent cells showed increased double positive staining for CD44 and CD24 over time as compared to the control cells. Moreover, the chemotherapy-induced senescent SW1990 cells were also analyzed for their expression of senescent markers including DPP4, IL6, and p21, stem cell markers including Oct3/4, CD24, and CD44, and NK ligands including Nectin and MICA, on day 0, and days 2, 4, and 24 post-treatment using the gene expression assay described above. As shown in FIG. 15, the expression of all of the markers mentioned showed an increase over time.

### Cytotoxicity of In Vitro Activated Human NK Cells

[1082] To evaluate the cytotoxicity of in vitro activated human NK Cells (treated with 18t15-12s), senescence in the human pancreatic tumor cell line SW1990 was induced through treatment with chemotherapeutic drugs Abraxane (Celgene) and Gemcitabine (Sigma Aldrich) for 3 days at 2.5 μM and 6.25 μM, respectively. SW1990 cells that were untreated were used as controls. Media was changed after 3 days and cells were allowed to rest in the culture media for 30 days. The culture media was changed every 4 days. Activated NK cells were obtained and their cytotoxicity for chemotherapy-induced senescent tumor cells and untreated control tumor cells were evaluated using the NK cell cytotoxicity assay described above. As shown in FIG. 16, activated NK cells showed increased cytotoxicity against both control SW1990 cells (SW1990) and senescent SW1990 cells (SW1990s).

### Example 5: Creation of an IL-12/IL-15RαSu DNA Construct

[1083] In a non-limiting example, an IL-12/IL-15RαSu DNA construct was created (FIG. 17). The human IL-12 subunit sequences, human IL-15RαSu sequence, human IL-15 sequence, human tissue factor 219 sequence, and human IL-18 sequence were obtained from the UniProt website and DNA for these sequences was synthesized by Genewiz. A DNA construct was made linking the IL-12 subunit beta (p40) to IL-12 subunit alpha (p35) with a GS (3) linker to generate a single chain version of IL-12 and then directly linking the IL-12 sequence to the IL-15RαSu sequence. The final IL-12/IL-15RαSu DNA construct sequence was synthesized by Genewiz.

[1084] The nucleic acid sequence of the IL12/IL-15RαSu construct (including signal peptide sequence) is as follows (SEQ ID NO: 181):

(Signal peptide)
ATGAAATGGGTGACCTTTATTTCTTTACTGTTCCTCTTTAGCAGCGCCT
ACTCC
(Human IL-12 subunit beta (p40))
ATTTGGGAACTGAAGAAGGACGTCTACGTGGTCGAACTGGACTGGTATC
CCGATGCTCCCGGCGAAATGGTGGTGCTCACTTGTGACACCCCCGAAGA
AGACGGCATCACTTGGACCCTCGATCAGAGCAGCGAGGTGCTGGGCTCC
GGAAAGACCCTCACAATCCAAGTTAAGGAGTTCGGAGACGCTGGCCAAT
ACACATGCCACAAGGGAGGCGAGGTGCTCAGCCATTCCTTATTATTATT
ACACAAGAAGGAAGACGGAATCTGGTCCACCGACATTTTAAAAGATCAG
AAGGAGCCCAAGAATAAGACCTTTTTAAGGTGTGAGGCCAAAAACTACA
GCGGTCGTTTCACTTGTTGGTGGCTGACCACCATTTCCACCGATTTAAC
CTTCTCCGTGAAAAGCAGCCGGGGAAGCTCCGACCCTCAAGGTGTGACA
TGTGGAGCCGCTACCCTCAGCGCTGAGAGGGTTCGTGGCGATAACAAGG
AATACGAGTACAGCGTGGAGTGCCAAGAAGATAGCGCTTGTCCCGCTGC
CGAAGAATCTTTACCCATTGAGGTGATGGTGGACGCCGTGCACAAACTC
AAGTACGAGAACTACACCTCCTCCTTCTTTATCCGGGACATCATTAAGC
CCGATCCTCCTAAGAATTTACAGCTGAAGCCTCTCAAAAATAGCCGGCA
AGTTGAGGTCTCTTGGGAATATCCCGACACTTGGAGCACACCCCACAGC
TACTTCTCTTTAACCTTTTGTGTGCAAGTTCAAGGTAAAAGCAAGCGGG
AGAAGAAAGACCGGTGTTTACCGACAAAACCAGCGCCACCGTCATCTGT
CGGAAGAACGCCTCCATCAGCGTGAGGGCTCAAGATCGTTATTACTCCA
GCAGCTGGTCCGAGTGGGCCAGCGTGCCTTGTTCC
(Linker)
GGCGGTGGAGGATCCGGAGGAGGTGGCTCCGGCGGCGGAGGATCT
(Human IL-12 subunit alpha (p35))
CGTAACCTCCCCGTGGCTACCCCCGATCCCGGAATGTTCCCTTGTTTAC
ACCACAGCCAGAATTTACTGAGGGCCGTGAGCAACATGCTGCAGAAAGC
TAGGCAGACTTTAGAATTTTACCCTTGCACCAGCGAGGAGATCGACCAT
GAAGATATCACCAAGGACAAGACATCCACCGTGGAGGCTTGTTTACCTC
TGGAGCTGACAAAGAACGAGTCTTGTCTCAACTCTCGTGAAACCAGCTT
CATCACAAATGGCTCTTGTTTAGCTTCCCGGAAGACCTCCTTTATGATG
GCTTTATGCCTCAGCTCCATCTACGAGGATTTAAAGATGTACCAAGTGG
AGTTCAAGACCATGAACGCCAAGCTGCTCATGGACCCTAAACGGCAGAT
CTTTTTAGACCAGAACATGCTGGCTGTGATTGATGAGCTGATGCAAGCT
TTAAACTTCAACTCCGAGACCGTCCCTCAGAAGTCCTCCCTCGAGGAGC
CCGATTTTTACAAGACAAAGATCAAACTGTGCATTTTACTCCACGCCTT
TAGGATCCGGGCCGTGACCATTGACCGGGTCATGAGCTATTTAAACGCC
AGC
(Human IL-15R a sushi domain)
ATTACATGCCCCCCTCCCATGAGCGTGGAGCACGCCGACATCTGGGTGA
AGAGCTATAGCCTCTACAGCCGGGAGAGGTATATCTGTAACAGCGGCTT
CAAGAGGAAGGCCGGCACCAGCAGCCTCACCGAGTGCGTGCTGAATAAG
GCTACCAACGTGGCTCACTGGACAACACCCTCTTTAAAGTGCATCCGG

### Example 6: Creation of an IL-18/TF/IL-15 DNA Construct

[1085] In a non-limiting example, an IL-18/TF/IL-15 construct was made (FIG. 18) linking the IL-18 sequence to the N-terminus coding region of tissue factor 219, and further linking the IL-18/TF construct with the N-terminus coding region of IL-15. The nucleic acid sequence of the IL-18/TF/IL-15 construct (including leader sequence), synthesized by Genewiz, is as follows (SEQ ID NO: 177):

(Signal peptide)
ATGAAGTGGGTCACATTTATCTCTTTACTGTTCCTCTTCTCCAGCGCCT
ACAGC
(Human IL-18)
TACTTCGGCAAACTGGAATCCAAGCTGAGCGTGATCCGGAATTTAAACG
ACCAAGTTCTGTTTATCGATCAAGGTAACCGGCCTCTGTTCGAGGACAT
GACCGACTCCGATTGCCGGGACAATGCCCCCCGGACCATCTTCATTATC
TCCATGTACAAGGACAGCCAGCCCCGGGGCATGGCTGTGACAATTAGCG
TGAAGTGTGAGAAAATCAGCACTTTATCTTGTGAGAACAAGATCATCTC
CTTTAAGGAAATGAACCCCCCCGATAACATCAAGGACACCAAGTCCGAT
ATCATCTTCTTCCAGCGGTCCGTGCCCGGTCACGATAACAAGATGCAGT
TCGAATCCTCCTCCTACGAGGGCTACTTTTTAGCTTGTGAAAAGGAGAG
GGATTTATTCAAGCTGATCCTCAAGAAGGAGGACGAGCTGGGCGATCGT
TCCATCATGTTCACCGTCCAAAACGAGGAT
(Human Tissue Factor 219)
AGCGGCACAACCAACACAGTCGCTGCCTATAACCTCACTTGGAAGAGCA
CCAACTTCAAAACCATCCTCGAATGGGAACCCAAACCCGTTAACCAAGT
TTACACCGTGCAGATCAGCACCAAGTCCGGCGACTGGAAGTCCAAATGT
TTCTATACCACCGACACCGAGTGCGATCTCACCGATGAGATCGTGAAAG
ATGTGAAACAGACCTACCTCGCCCGGGTGTTTAGCTACCCCGCCGGCAA
TGTGGAGAGCACTGGTTCCGCTGGCGAGCCTTTATACGAGAACAGCCCC
GAATTTACCCCTTACCTCGAGACCAATTTAGGACAGCCCACCATCCAAA
GCTTTGAGCAAGTTGGCACAAAGGTGAATGTGACAGTGGAGGACGAGCG
GACTTTAGTGCGGCGGAACAACACCTTTCTCAGCCTCCGGGATGTGTTC
GGCAAAGATTTAATCTACACACTGTATTACTGGAAGTCCTCTTCCTCCG
GCAAGAAGACAGCTAAAACCAACACAAACGAGTTTTTAATCGACGTGGA
TAAAGGCGAAAACTACTGTTTCAGCGTGCAAGCTGTGATCCCCTCCCGG
ACCGTGAATAGGAAAAGCACCGATAGCCCCGTTGAGTGCATGGGCCAAG
AAAAGGGCGAGTTCCGGGAG
(Human IL-15)
AACTGGGTGAACGTCATCAGCGATTTAAAGAAGATCGAAGATTTAATTC
AGTCCATGCATATCGACGCCACTTTATACACAGAATCCGACGTGCACCC
CTCTTGTAAGGTGACCGCCATGAAATGTTTTTTACTGGAGCTGCAAGTT
ATCTCTTTAGAGAGCGGAGACGCTAGCATCCACGACACCGTGGAGAATT
TAATCATTTTAGCCAATAACTCTTTATCCAGCAACGGCAACGTGACAGA
GTCCGGCTGCAAGGAGTGCGAAGAGCTGGAGGAGAAGAACATCAAGGAG
TTTCTGCAATCCTTTGTGCACATTGTCCAGATGTTCATCAATACCTCC

### Example 7: Secretion of IL-12/IL-15RαSu and IL-18/TF/IL-15 Fusion Proteins

[1086] The IL-12/IL-15RαSu and IL-18/TF/IL-15 DNA constructs were cloned into a pMSGV-1 modified retrovirus expression vector (as described by Hughes, Hum Gene Ther 16:457-72, 2005, hereby incorporated by reference), and the expression vector was transfected into CHO-K1 cells. Co-expression of the two constructs in CHO-K1 cells allowed for formation and secretion of a soluble IL-18/TF/IL-15:IL-12/IL-15RαSu protein complex (referred to as 18t15-12s; FIG. 19 and FIG. 20). The 18t15-12s protein was purified from CHO-K1 cell culture supernatant using anti-TF antibody affinity chromatography and size exclusion chromatography resulting in soluble (non-aggregated) protein complexes consisting of IL-12/IL-15RαSu and IL-18/TF/IL-15 fusion proteins.

[1087] The amino acid sequence of the IL12/IL-15RαSu fusion protein (including signal peptide sequence) is as follows (SEQ ID NO: 180):

(Signal peptide)
MKWVTFISLLFLFSSAYS
(Human IL-12 subunit beta (p40))
IWELKKDVYVVELDWYPDAPGEMVVLTCDTPEEDGITWTLDQSSEVLGSGK
TLTIQVKEFGDAGQYTCHKGGEVLSHSLLLLHKKEDGIWSTDILKDQKEPK
NKTFLRCEAKNYSGRFTCWWLTTISTDLTFSVKSSRGSSDPQGVTCGAATL
SAERVRGDNKEYEYSVECQEDSACPAAEESLPIEVMVDAVHKLKYENYTSS
FFIRDIIKPDPPKNLQLKPLKNSRQVEVSWEYPDTWSTPHSYFSLTFCVQV
QGKSKREKKDRVFTDKTSATVICRKNASISVRAQDRYYSSSWSEWASVPCS
(Linker)
GGGGSGGGGSGGGGS
(Human IL-12 subunit alpha (p35))
RNLPVATPDPGMFPCLHHSQNLLRAVSNMLQKARQTLEFYPCTSEEIDHED
ITKDKTSTVEACLPLELTKNESCLNSRETSFITNGSCLASRKTSFMMALCL
SSIYEDLKMYQVEFKTMNAKLLMDPKRQIFLDQNMLAVIDELMQALNFNSE
TVPQKSSLEEPDFYKTKIKLCILLHAFRIRAVTIDRVMSYLNAS
(Human IL-15R α sushi domain)
ITCPPPMSVEHADIWVKSYSLYSRERYICNSGFKRKAGTSSLTECVLNKAT
NVAHWTTPSLKCIR
The amino acid sequence of the IL-18/TF/IL-15
fusion protein (including signal peptide sequence)
is as follows (SEQ ID NO: 176):
(Signal peptide)
MKWVTFISLLFLFSSAYS
(Human IL-18)
YFGKLESKLSVIRNLNDQVLFIDQGNRPLFEDMTDSDCRDNAPRTIFIISM
YKDSQPRGMAVTISVKCEKISTLSCENKIISFKEMNPPDNIKDTKSDIIFF
QRSVPGHDNKMQFESSSYEGYFLACEKERDLFKLILKKEDELGDRSIMFTV
QNED
(Human Tissue Factor 219)
SGTTNTVAAYNLTWKSTNFKTILEWEPKPVNQVYTVQISTKSGDWKSKCFY
TTDTECDLTDEIVKDVKQTYLARVFSYPAGNVESTGSAGEPLYENSPEFTP
YLETNLGQPTIQSFEQVGTKVNVTVEDERTLVRRNNTFLSLRDVFGKDLIY
TLYYWKSSSSGKKTAKTNTNEFLIDVDKGENYCFSVQAVIPSRTVNRKSTD
SPVECMGQEKGEFRE
(Human IL-15)
NWVNVISDLKKIEDLIQSMHIDATLYTESDVHPSCKVTAMKCFLLELQVIS
LESGDASIHDTVENLIILANNSLSSNGNVTESGCKECEELEEKNIKEFLQS
FVHIVQMFINTS

[1088] In some cases, the leader (signal sequence) peptide is cleaved from the intact polypeptide to generate the mature form that may be soluble or secreted.

### Example 8: Purification of 18t15-12s by Immunoaffinity Chromatography

[1089] An anti-TF antibody affinity column was connected to a GE Healthcare™ AKTA Avant protein purification system. The flow rate was 4 mL/min for all steps except the elution step, which was 2 mL/min.

[1090] Cell culture harvest of 18t15-12s was adjusted to pH 7.4 with 1M Tris base and loaded onto the anti-TF antibody affinity column equilibrated with 5 column volumes of PBS. After loading the sample, the column was washed with 5 column volumes PBS, followed by elution with 6 column volumes 0.1M acetic acid, pH 2.9. Absorbance at 280 nm was collected and then the sample was neutralized to pH 7.5-8.0 by adding 1M Tris base. The neutralized sample was then buffer exchanged into PBS using Amicon® centrifugal filters with a 30 KDa molecular weight cutoff. FIG. 21 shows that the 18t15-12s complex binds the anti-TF antibody affinity column, wherein TF is an 18t15-12s binding partner. The buffer-exchanged protein sample is stored at 2-8° C. for further biochemical analysis and biological activity testing.

[1091] After each elution, the anti-TF antibody affinity column was then stripped using 6 column volumes 0.1M glycine, pH 2.5. The column was then neutralized using 10 column volumes PBS, 0.05% sodium azide and stored at 2-8° C.

### Example 9: Size Exclusion Chromatography of 18t15-12s

[1092] A GE Healthcare Superdex® 200 Increase 10/300 GL gel filtration column was connected to a GE Healthcare AKTA™ Avant protein purification system. The column was equilibrated with 2 column volumes of PBS. The flow rate was 0.8 mL/min. A capillary loop was used to inject 2004, of 1 mg/mL of 18t15-12s complex onto the column. The injection was chased with 1.25 column volumes of PBS. The SEC chromatograph is shown in FIG. 22. There is a main 18t15-12s protein peak with a minor high molecular weight peak, likely due to differing degrees of glycosylation of 18t15-12s dimers or aggregates.

### Example 10: SDS-PAGE of 18t15-12s

[1093] To determine the purity and protein molecular weight, the purified 18t15-12s protein sample was analyzed using 4-12% NuPage Bis-Tris protein gel SDS-PAGE. The gel was stained with InstantBlue™ for about 30 min, followed by destaining overnight in purified water. FIG. 23 shows an example SDS gel of anti-TF antibody affinity purified 18t15-12s, with bands at the expected molecular weights (66 kDa and 56 kDa).

### Example 11: Glycosylation of 18t15-12s in CHO-K1 Cells

[1094] Glycosylation of 18t15-12s in CHO-K1 cells was confirmed using the Protein Deglycosylation Mix II kit (New England Biolabs), according to the manufacturer's instructions. FIG. 24 shows an example SDS PAGE of deglycosylated and non-deglycosylated 18t15-12s. Deglycosylation reduces the molecular weight of 18t15-12s as seen in FIG. 24, lane 4.

### Example 12: Recombinant Protein Quantitation of 18t15-12s Complexes

[1095] The 18t15-12s complex was detected and quantified using standard sandwich ELISA methods (FIGS. 25-28). Anti-human tissue factor antibody served as the capture antibody and biotinylated anti-human IL-12, IL-15, or IL-18 antibody (BAF 219, BAM 247, D045-6, all R&D Systems) served as the detection antibody. Tissue factor in purified 18t15-12s protein complexes was also detected using an anti-human tissue factor capture antibody (143), and anti-human tissue factor antibody detection. The I43/anti-TF antibody ELISA was compared to purified tissue factor at similar concentrations.

### Example 13: Immunostimulatory Capacity of the 18t15-12s Complex

[1096] To assess the IL-15 immunostimulatory activity of the 18t15-12s complex, increasing concentrations of 18t15-12s was added to 32Dβ cells (104 cell/well) in 200 IMDM:10% FBS media. The 32Dβ cells were incubated for 3 days at 37° C. On the fourth day, WST-1 proliferation reagent (10 μL/well) was added and after 4 hours, absorbance was measured at 450 nm to determine cell proliferation based on cleavage of WST-1 to a soluble formazan dye. Bioactivity of human recombinant IL-15 was assessed as a positive control. As shown in FIG. 29, 18t15-12s demonstrated IL-15-dependent cell proliferation of 32Dβ cells. The 18t15-12s complex demonstrated reduced activity compared to human recombinant IL-15, possibly due to the linkage of IL-18 and tissue factor to the IL-15 domain.

[1097] In order to assess the individual activities of IL-12 and IL-18 in the 18t15-12s complex, 18t15-12s was added to HEK-Blue IL-12 and HEK-Blue IL-18 reporter cells (5×10⁴ cell/well; hkb-i112 and hkb-hmi118, InvivoGen) in 200 μL IMDM:10% heat-inactivated FBS media. Cells were incubated for overnight at 37° C. 20 μl of induced HEK-Blue IL-12 and HEK-Blue IL-18 reporter cell supernatant was added to 180 μl of QUANTI-Blue (InvivoGen), and incubated for 1-3 hours at 37° C. IL-12 or IL-18 activity was assessed by measuring absorbance at 620 nm. Human recombinant IL-12 or IL-18 was assessed as a positive or negative control. As shown in FIG. 30 and FIG. 31, each of the cytokine domains of the 18t15-12s complex retain specific biological activity. The activity of 18t15-12s was reduced compared to that of human recombinant IL-18 or IL-12, possibly due to linkage of IL-15 and tissue factor to the IL-18 domain and linkage of IL-12 to the IL-15Rα sushi domain.

### Example 14: Induction of Cytokine-Induced Memory-Like NK Cells by the 18t15-12s Complex

[1098] Cytokine-induced memory-like NK cells can be induced ex vivo following overnight stimulation of purified NK cells with saturating amounts of IL-12 (10 ng/mL), IL-15 (50 ng/mL), and IL-18 (50 ng/mL). These memory-like properties have been measured through expression of IL-2 receptor a (IL-2Ra, CD25), CD69 (and other activation markers), and increased IFN-γ production. To evaluate the ability of 18t15-12s complexes to promote generation of cytokine-induced memory-like NK cells, purified human NK cells (>95% CD56+) were stimulated for 14-18 hours with 0.01 nM to 10000 nM of the 18t15-12s complex or a combination of individual cytokines (recombinant IL-12 (10 ng/ml), IL-18 (50 ng/ml), and IL-15 (50 ng/ml)). Cell-surface CD25 and CD 69 expression and intracellular IFN-γ levels were assessed by antibody-staining and flow cytometry.

[1099] Fresh human leukocytes were obtained from a blood bank and CD56+NK cells were isolated with the RosetteSep/human NK cell reagent (StemCell Technologies). The purity of NK cells was >70% and confirmed by staining with CD56-BV421, CD16-BV510, CD25-PE, CD69-APCFire750 specific antibodies (BioLegend). Cells were counted and resuspended in 0.2×10⁶/mL in a 96 well flat bottom plate in 0.2 mL of complete media (RPMI 1640 (Gibco), supplemented with 2 mM L-glutamine (Thermo Life Technologies), penicillin (Thermo Life Technologies), streptomycin (Thermo Life Technologies), and 10% FBS (Hyclone)). Cells were stimulated with either a mixture of cytokines hIL-12 (10 ng/mL) (Biolegend), hIL-18 (50 ng/mL) (R&D Systems) and hIL-15 (50 ng/mL) (NCI) or with 0.01 nM to 10000 nM of the 18t15-12s at 37° C., 5% CO₂ for 14-18 hrs. The cells were then harvested and surface stained for CD56-BV421, CD16-BV510, CD25-PE, CD69-APCFire750 specific antibodies (BioLegend) for 30 minutes. After staining, cells were washed (1500 RPM for 5 minutes at room temperature) in FACS buffer (1×PBS (Hyclone), with 0.5% BSA (EMD Millipore) and 0.001% sodium azide (Sigma)). After two washes, cells were analyzed using a BD FACSCelesta™ flow cytometer (Plotted Data-Mean Fluorescence Intensity; FIG. 32A and FIG. 32B).

[1100] Fresh human leukocytes were obtained from a blood bank and CD56+NK cells were isolated with the RosetteSep/human NK cell reagent (StemCell Technologies). The purity of NK cells was >70% and confirmed by staining with CD56-BV421, CD16-BV510, CD25-PE, CD69-APCFire750 specific antibodies (BioLegend). Cells were counted and resuspended in 0.2×10⁶/mL in a 96 well flat bottom plate in 0.2 mL of complete media (RPMI 1640 (Gibco), supplemented with 2 mM L-glutamine (Thermo Life Technologies), penicillin (Thermo Life Technologies), streptomycin (Thermo Life Technologies), and 10% FBS (Hyclone)). Cells were stimulated with either a cytokine mix of hIL-12 (10 ng/mL) (Biolegend), hIL-18 (50 ng/mL) (R&D), and hIL-15 (50 ng/mL) (NCI), or 0.01 nM to 10000 nM of the 18t15-12s complex at 37° C., 5% CO₂ for 14-18 hrs. The cells were then treated with 10 μg/mL of Brefeldin A (Sigma) and 1× of Monensin (eBioscience) for 4 hrs before harvesting and staining for CD56-BV421, CD16-BV510, CD25-PE, CD69-APCFire750 specific antibodies for 30 minutes. After staining, cells were washed (1500 RPM for 5 minutes in room temperature) in FACS buffer (1×PBS (Hyclone), with 0.5% BSA (EMD Millipore) and 0.001% sodium azide (Sigma)) and fixed for 10 minutes at room temperature. After fixation, cells were washed (1500 RPM for 5 minutes in room temperature) in 1× permeabilized buffer (eBioscience) and stained with IFN-γ-PE (Biolegend) for 30 minutes at room temperature. Cells were washed once again with 1× permeabilized buffer and then washed with FACS buffer. Cell pellets were resuspended in 300 μls of FACS buffer and analyzed using a BD FACSCelesta™ flow cytometer (Plotted % of IFN-γ Positive Cells; FIG. 33).

### Example 15: In Vitro Cytotoxicity of NK Cells Against Human Tumor Cells

[1101] Human myelogenous leukemia cells, K562 (CellTrace violet labelled), were incubated with purified human NK cells in the presence of increasing concentrations of the 18t15-12s complex or a mixture of cytokines as a control. After 20 hours, the cultures were harvested, stained with propidium iodide (PI), and assessed by flow cytometry. As shown in FIG. 34, the 18t15-12s complex induced human NK cytotoxicity against K562, at levels similar or greater than the cytokine mixture, wherein both the 18t15-12s complex and the cytokine mixture induced greater cytotoxicity than the medium control.

### Example 16: Creation of IL-12/IL-15RαSu/αCD16scFv and IL-18/TF/IL-15 DNA Constructs

[1102] In a non-limiting example, IL-12/IL-15RαSu/αCD16scFv and IL-18/TF/IL-15 DNA constructs were created (FIG. 35 and FIG. 36). The human IL-12 subunit sequences, human IL-15RαSu sequence, human IL-15 sequence, human tissue factor 219 sequence, and human IL-18 sequence were synthesized by Genewiz. A DNA construct was made linking the IL-12 subunit beta (p40) to IL-12 subunit alpha (p35) with a GS (3) linker to generate a single chain version of IL-12, directly linking the IL-12 sequence to the IL-15RαSu sequence, and directly linking the IL-12/IL-15RαSu construct to the N-terminus coding region of αCD16scFv.

[1103] The nucleic acid sequence of the IL-12/IL-15RαSu/αCD16scFv construct is as follows (SEQ ID NO: 226):

(Signal peptide)
ATGAAATGGGTGACCTTTATTTCTTTACTGTTCCTCTTTAGCAGCGCCTAC
TCC
(Human IL-12 subunit beta (p40))
ATTTGGGAACTGAAGAAGGACGTCTACGTGGTCGAACTGGACTGGTATCCC
TGCTCCCGGCGAAATGGTGGTGCTCACTTGTGACACCCCCGAAGAAGGAAC
GGCATCACTTGGACCCTCGATCAGAGCAGCGAGGTGCTGGGCTCCGGAAAG
ACCCTCACAATCCAAGTTAAGGAGTTCGGAGACGCTGGCCAATACACATGC
CACAAGGGAGGCGAGGTGCTCAGCCATTCCTTATTATTATTACACAAGAAG
GAAGACGGAATCTGGTCCACCGACATTTTAAAAGATCAGAAGGAGCCCAAG
AATAAGACCTTTTTAAGGTGTGAGGCCAAAAACTACAGCGGTCGTTTCACT
TGTTGGTGGCTGACCACCATTTCCACCGATTTAACCTTCTCCGTGAAAAGC
AGCCGGGGAAGCTCCGACCCTCAAGGTGTGACATGTGGAGCCGCTACCCTC
AGCGCTGAGAGGGTTCGTGGCGATAACAAGGAATACGAGTACAGCGTGGAG
TGCCAAGAAGATAGCGCTTGTCCCGCTGCCGAAGAATCTTTACCCATTGAG
GTGATGGTGGACGCCGTGCACAAACTCAAGTACGAGAACTACACCTCCTCC
TTCTTTATCCGGGACATCATTAAGCCCGATCCTCCTAAGAATTTACAGCTG
AAGCCTCTCAAAAATAGCCGGCAAGTTGAGGTCTCTTGGGAATATCCCGAC
ACTTGGAGCACACCCCACAGCTACTTCTCTTTAACCTTTTGTGTGCAAGTT
CAAGGTAAAAGCAAGCGGGAGAAGAAAGACCGGGTGTTTACCGACAAAACC
AGCGCCACCGTCATCTGTCGGAAGAACGCCTCCATCAGCGTGAGGGCTCAA
GATCGTTATTACTCCAGCAGCTGGTCCGAGTGGGCCAGCGTGCCTTGTTCC
(Linker)
GGCGGTGGAGGATCCGGAGGAGGTGGCTCCGGCGGCGGAGGATCT
(Human IL-12 subunit alpha (p35))
CGTAACCTCCCCGTGGCTACCCCCGATCCCGGAATGTTCCCTTGTTTACAC
CACAGCCAGAATTTACTGAGGGCCGTGAGCAACATGCTGCAGAAAGCTAGG
CAGACTTTAGAATTTTACCCTTGCACCAGCGAGGAGATCGACCATGAAGAT
ATCACCAAGGACAAGACATCCACCGTGGAGGCTTGTTTACCTCTGGAGCTG
ACAAAGAACGAGTCTTGTCTCAACTCTCGTGAAACCAGCTTCATCACAAAT
GGCTCTTGTTTAGCTTCCCGGAAGACCTCCTTTATGATGGCTTTATGCCTC
AGCTCCATCTACGAGGATTTAAAGATGTACCAAGTGGAGTTCAAGACCATG
AACGCCAAGCTGCTCATGGACCCTAAACGGCAGATCTTTTTAGACCAGAAC
ATGCTGGCTGTGATTGATGAGCTGATGCAAGCTTTAAACTTCAACTCCGAG
ACCGTCCCTCAGAAGTCCTCCCTCGAGGAGCCCGATTTTTACAAGACAAAG
ATCAAACTGTGCATTTTACTCCACGCCTTTAGGATCCGGGCCGTGACCATT
GACCGGGTCATGAGCTATTTAAACGCCAGC
(Human IL-15R α sushi domain)
ATTACATGCCCCCCTCCCATGAGCGTGGAGCACGCCGACATCTGGGTGAAG
GACTATAGCCTCTACAGCCGGGAGAGGTATATCTGTAACAGCGGCTTCAAG
AGGAAGGCCGGCACCAGCAGCCTCACCGAGTGCGTGCTGAATAAGGCTACC
AACGTGGCTCACTGGACAACACCCTCTTTAAAGTGCATCCGG
(anti-Human CD16 light chain variable domain)
TCCGAGCTGACCCAGGACCCTGCTGTGTCCGTGGCTCTGGGCCAGACCGTG
AGGATCACCTGCCAGGGCGACTCCCTGAGGTCCTACTACGCCTCCTGGTAC
CAGCAGAAGCCCGGCCAGGCTCCTGTGCTGGTGATCTACGGCAAGAACAAC
AGGCCCTCCGGCATCCCTGACAGGTTCTCCGGATCCTCCTCCGGCAACACC
GCCTCCCTGACCATCACAGGCGCTCAGGCCGAGGACGAGGCTGACTACTAC
TGCAACTCCAGGGACTCCTCCGGCAACCATGTGGTGTTCGGCGGCGGCACC
AAGCTGACCGTGGGCCAT
(Linker)
GGCGGCGGCGGCTCCGGAGGCGGCGGCAGCGGCGGAGGAGGATCC
(anti-Human CD16 heavy chain variable domain)
GAGGTGCAGCTGGTGGAGTCCGGAGGAGGAGTGGTGAGGCCTGGAGGCTCC
CTGAGGCTGAGCTGTGCTGCCTCCGGCTTCACCTTCGACGACTACGGCATG
TCCTGGGTGAGGCAGGCTCCTGGAAAGGGCCTGGAGTGGGTGTCCGGCATC
AACTGGAACGGCGGATCCACCGGCTACGCCGATTCCGTGAAGGGCAGGTTC
ACCATCAGCAGGGACAACGCCAAGAACTCCCTGTACCTGCAGATGAACTCC
CTGAGGGCCGAGGACACCGCCGTGTACTACTGCGCCAGGGGCAGGTCCCTG
CTGTTCGACTACTGGGGACAGGGCACCCTGGTGACCGTGTCCAGG

[1104] Constructs were also made linking the IL-18 sequence to the N-terminus coding region of tissue factor 219, and linking the IL-18/TF construct with the N-terminus coding region of IL-15 (FIG. 36). The nucleic acid sequence of the IL-18/TF/IL-15 construct (including leader sequence) is as follows (SEQ ID NO: 177):

(Signal peptide)
ATGAAGTGGGTCACATTTATCTCTTTACTGTTCCTCTTCTCCAGCGCCTAC
AGC
(Human IL-18)
TACTTCGGCAAACTGGAATCCAAGCTGAGCGTGATCCGGAATTTAAACGAC
CAAGTTCTGTTTATCGATCAAGGTAACCGGCCTCTGTTCGAGGACATGACC
GACTCCGATTGCCGGGACAATGCCCCCCGGACCATCTTCATTATCTCCATG
TACAAGGACAGCCAGCCCCGGGGCATGGCTGTGACAATTAGCGTGAAGTGT
GAGAAAATCAGCACTTTATCTTGTGAGAACAAGATCATCTCCTTTAAGGAA
ATGAACCCCCCCGATAACATCAAGGACACCAAGTCCGATATCATCTTCTTC
CAGCGGTCCGTGCCCGGTCACGATAACAAGATGCAGTTCGAATCCTCCTCC
TACGAGGGCTACTTTTTAGCTTGTGAAAAGGAGAGGGATTTATTCAAGCTG
ATCCTCAAGAAGGAGGACGAGCTGGGCGATCGTTCCATCATGTTCACCGTC
CAAAACGAGGAT
(Human Tissue Factor 219)
AGCGGCACAACCAACACAGTCGCTGCCTATAACCTCACTTGGAAGAGCACC
AACTTCAAAACCATCCTCGAATGGGAACCCAAACCCGTTAACCAAGTTTAC
ACCGTGCAGATCAGCACCAAGTCCGGCGACTGGAAGTCCAAATGTTTCTAT
ACCACCGACACCGAGTGCGATCTCACCGATGAGATCGTGAAAGATGTGAAA
CAGACCTACCTCGCCCGGGTGTTTAGCTACCCCGCCGGCAATGTGGAGAGC
ACTGGTTCCGCTGGCGAGCCTTTATACGAGAACAGCCCCGAATTTACCCCT
TACCTCGAGACCAATTTAGGACAGCCCACCATCCAAAGCTTTGAGCAAGTT
GGCACAAAGGTGAATGTGACAGTGGAGGACGAGCGGACTTTAGTGCGGCGG
AACAACACCTTTCTCAGCCTCCGGGATGTGTTCGGCAAAGATTTAATCTAC
ACACTGTATTACTGGAAGTCCTCTTCCTCCGGCAAGAAGACAGCTAAAACC
AACACAAACGAGTTTTTAATCGACGTGGATAAAGGCGAAAACTACTGTTTC
AGCGTGCAAGCTGTGATCCCCTCCCGGACCGTGAATAGGAAAAGCACCGAT
AGCCCCGTTGAGTGCATGGGCCAAGAAAAGGGCGAGTTCCGGGAG
(Human IL-15)
AACTGGGTGAACGTCATCAGCGATTTAAAGAAGATCGAAGATTTAATTCAG
TCCATGCATATCGACGCCACTTTATACACAGAATCCGACGTGCACCCCTCT
TGTAAGGTGACCGCCATGAAATGTTTTTTACTGGAGCTGCAAGTTATCTCT
TTAGAGAGCGGAGACGCTAGCATCCACGACACCGTGGAGAATTTAATCATT
TTAGCCAATAACTCTTTATCCAGCAACGGCAACGTGACAGAGTCCGGCTGC
AAGGAGTGCGAAGAGCTGGAGGAGAAGAACATCAAGGAGTTTCTGCAATCC
TTTGTGCACATTGTCCAGATGTTCATCAATACCTCC

### Example 17: Secretion of IL-12/IL-15RαSu/αCD16scFv and IL-18/TF/IL-15 Fusion Proteins

[1105] The IL-12/IL-15RαSu/αCD16scFv and IL-18/TF/IL-15 constructs were cloned into a pMSGV-1 modified retrovirus expression vector (Hughes, Hum Gene Ther 16:457-72, 2005, herein incorporated by reference), and the expression vector was transfected into CHO-K1 cells. Co-expression of the two constructs in CHO-K1 cells resulted in secretion of a soluble IL-18/TF/IL-15:IL-12/IL-15RαSu/αCD16scFv protein complex (referred to as 18t15-12s/αCD16; FIG. 37 and FIG. 38). Co-expression of the two constructs in CHO-K1 cells resulted in secretion of the soluble IL-18/TF/IL-15:IL-12/IL-15RαSu/αCD16scFv protein complex (referred to as 18t15-12s/αCD16; FIG. 37 and FIG. 38), which can be purified by anti-TF Ab affinity and other chromatography methods. In some cases, the signal peptide is cleaved from the intact polypeptide to generate the mature form.

[1106] The amino acid sequence of the IL-12/IL-15RαSu/αCD16scFv fusion protein (including signal peptide sequence) is as follows (SEQ ID NO: 225):

(Signal peptide)
MKWVTFISLLFLFSSAYS
(Human IL-12 subunit beta (p40))
IWELKKDVYVVELDWYPDAPGEMVVLTCDTPEEDGITWTLDQSSEVLGSGK
TLTIQVKEFGDAGQYTCHKGGEVLSHSLLLLHKKEDGIWSTDILKDQKEPK
NKTFLRCEAKNYSGRFTCWWLTTISTDLTFSVKSSRGSSDPQGVTCGAATL
SAERVRGDNKEYEYSVECQEDSACPAAEESLPIEVMVDAVHKLKYENYTSS
FFIRDIIKPDPPKNLQLKPLKNSRQVEVSWEYPDTWSTPHSYFSLTFCVQV
QGKSKREKKDRVFTDKTSATVICRKNASISVRAQDRYYSSSWSEWASVPCS
(Linker)
GGGGSGGGGSGGGGS
(Human IL-12 subunit alpha (p35))
RNLPVATPDPGMFPCLHHSQNLLRAVSNMLQKARQTLEFYPCTSEEIDHED
ITKDKTSTVEACLPLELTKNESCLNSRETSFITNGSCLASRKTSFMMALCL
SSIYEDLKMYQVEFKTMNAKLLMDPKRQIFLDQNMLAVIDELMQALNFNSE
TVPQKSSLEEPDFYKTKIKLCILLHAFRIRAVTIDRVMSYLNAS
(Human IL-15R α sushi domain)
ITCPPPMSVEHADIWVKSYSLYSRERYICNSGFKRKAGTSSLTECVLNKAT
NVAHWTTPSLKCIR
(anti-Human CD16 light chain variable domain)
SELTQDPAVSVALGQTVRITCQGDSLRSYYASWYQQKPGQAPVLVIYGKNN
RPSGIPDRFSGSSSGNTASLTITGAQAEDEADYYCNSRDSSGNHVVFGGGT
KLTVGH
(Linker)
GGGGSGGGGSGGGGS
(anti-Human CD16 heavy chain variable domain)
EVQLVESGGGVVRPGGSLRLSCAASGFTFDDYGMSWVRQAPGKGLEWVSGI
NWNGGSTGYADSVKGRFTISRDNAKNSLYLQMNSLRAEDTAVYYCARGRSL
LFDYWGQGTLVTVSR
The amino acid sequence of the IL-18/TF/IL-15
fusion protein (including leader sequence) is as
follows (SEQ ID NO: 221):
(Signal peptide)
MKWVTFISLLFLFSSAYS
(Human IL-18)
YFGKLESKLSVIRNLNDQVLFIDQGNRPLFEDMTDSDCRDNAPRTIFIISM
YKDSQPRGMAVTISVKCEKISTLSCENKIISFKEMNPPDNIKDTKSDIIFF
QRSVPGHDNKMQFESSSYEGYFLACEKERDLFKLILKKEDELGDRSIMFTV
QNED
(Human Tissue Factor 219)
SGTTNTVAAYNLTWKSTNFKTILEWEPKPVNQVYTVQISTKSGDWKSKCFY
TTDTECDLTDEIVKDVKQTYLARVFSYPAGNVESTGSAGEPLYENSPEFTP
YLETNLGQPTIQSFEQVGTKVNVTVEDERTLVRRNNTFLSLRDVFGKDLIY
TLYYWKSSSSGKKTAKTNTNEFLIDVDKGENYCFSVQAVIPSRTVNRKSTD
SPVECMGQEKGEFRE
(Human IL-15)
NWVNVISDLKKIEDLIQSMHIDATLYTESDVHPSCKVTAMKCFLLELQVIS
LESGDASIHDTVENLIILANNSLSSNGNVTESGCKECEELEEKNIKEFLQS
FVHIVQMFINTS

### Example 18: Creation of IL-18/IL-15RαSu and IL-12/TF/IL-15 DNA Constructs

[1107] In a non-limiting example, IL-18/IL-15RαSu and IL-12/TF/IL-15 DNA constructs were created. The human IL-18 subunit sequences, human IL-15RαSu sequence, human IL-12 sequence, human tissue factor 219 sequence, and human IL-15 sequence were synthesized by Genewiz. A DNA construct was made linking IL-18 directly to IL-15RαSu. An additional construct was also made linking IL-12 sequence to the N-terminus coding region of human tissue factor 219 form, and further linking the IL-12/TF construct to the N-terminus coding region of IL-15. As described above, a single-chain version of IL-12 (p40-linker-p35) was used.

[1108] The nucleic acid sequence of the IL-18/IL-15RαSu construct (including signal peptide sequence) is as follows (SEQ ID NO: 320):

(Signal peptide)
ATGAAGTGGGTCACATTTATCTCTTTACTGTTCCTCTTCTCCAGCGCCTAC
AGC
(Human IL-18)
TACTTCGGCAAACTGGAATCCAAGCTGAGCGTGATCCGGAATTTAAACGAC
CAAGTTCTGTTTATCGATCAAGGTAACCGGCCTCTGTTCGAGGACATGACC
GACTCCGATTGCCGGGACAATGCCCCCCGGACCATCTTCATTATCTCCATG
TACAAGGACAGCCAGCCCCGGGGCATGGCTGTGACAATTAGCGTGAAGTGT
GAGAAAATCAGCACTTTATCTTGTGAGAACAAGATCATCTCCTTTAAGGAA
ATGAACCCCCCCGATAACATCAAGGACACCAAGTCCGATATCATCTTCTTC
CAGCGGTCCGTGCCCGGTCACGATAACAAGATGCAGTTCGAATCCTCCTCC
TACGAGGGCTACTTTTTAGCTTGTGAAAAGGAGAGGGATTTATTCAAGCTG
ATCCTCAAGAAGGAGGACGAGCTGGGCGATCGTTCCATCATGTTCACCGTC
CAAAACGAGGAT
(Human IL-15R α sushi domain)
ATTACATGCCCCCCTCCCATGAGCGTGGAGCACGCCGACATCTGGGTGAAG
AGCTATAGCCTCTACAGCCGGGAGAGGTATATCTGTAACAGCGGCTTCAAG
AGGAAGGCCGGCACCAGCAGCCTCACCGAGTGCGTGCTGAATAAGGCTACC
AACGTGGCTCACTGGACAACACCCTCTTTAAAGTGCATCCGG
The nucleic acid sequence of the IL-12/TF/IL-15
construct (including leader sequence) is as follows
(SEQ ID NO: 321):
(Signal peptide)
ATGAAATGGGTGACCTTTATTTCTTTACTGTTCCTCTTTAGCAGCGCCTAC
TCC
(Human IL-12 subunit beta (p40))
ATTTGGGAACTGAAGAAGGACGTCTACGTGGTCGAACTGGACTGGTATCCC
GATGCTCCCGGCGAAATGGTGGTGCTCACTTGTGACACCCCCGAAGAAGAC
GGCATCACTTGGACCCTCGATCAGAGCAGCGAGGTGCTGGGCTCCGGAAAG
ACCCTCACAATCCAAGTTAAGGAGTTCGGAGACGCTGGCCAATACACATGC
CACAAGGGAGGCGAGGTGCTCAGCCATTCCTTATTATTATTACACAAGAAG
GAAGACGGAATCTGGTCCACCGACATTTTAAAAGATCAGAAGGAGCCCAAG
AATAAGACCTTTTTAAGGTGTGAGGCCAAAAACTACAGCGGTCGTTTCACT
TGTTGGTGGCTGACCACCATTTCCACCGATTTAACCTTCTCCGTGAAAAGC
AGCCGGGGAAGCTCCGACCCTCAAGGTGTGACATGTGGAGCCGCTACCCTC
AGCGCTGAGAGGGTTCGTGGCGATAACAAGGAATACGAGTACAGCGTGGAG
TGCCAAGAAGATAGCGCTTGTCCCGCTGCCGAAGAATCTTTACCCATTGAG
GTGATGGTGGACGCCGTGCACAAACTCAAGTACGAGAACTACACCTCCTCC
TTCTTTATCCGGGACATCATTAAGCCCGATCCTCCTAAGAATTTACAGCTG
AAGCCTCTCAAAAATAGCCGGCAAGTTGAGGTCTCTTGGGAATATCCCGAC
ACTTGGAGCACACCCCACAGCTACTTCTCTTTAACCTTTTGTGTGCAAGTT
CAAGGTAAAAGCAAGCGGGAGAAGAAAGACCGGGTGTTTACCGACAAAACC
AGCGCCACCGTCATCTGTCGGAAGAACGCCTCCATCAGCGTGAGGGCTCAA
GATCGTTATTACTCCAGCAGCTGGTCCGAGTGGGCCAGCGTGCCTTGTTCC
(Linker)
GGCGGTGGAGGATCCGGAGGAGGTGGCTCCGGCGGCGGAGGATCT
(Human IL-12 subunit alpha (p35))
CGTAACCTCCCCGTGGCTACCCCCGATCCCGGAATGTTCCCTTGTTTACAC
CACAGCCAGAATTTACTGAGGGCCGTGAGCAACATGCTGCAGAAAGCTAGG
CAGACTTTAGAATTTTACCCTTGCACCAGCGAGGAGATCGACCATGAAGAT
ATCACCAAGGACAAGACATCCACCGTGGAGGCTTGTTTACCTCTGGAGCTG
ACAAAGAACGAGTCTTGTCTCAACTCTCGTGAAACCAGCTTCATCACAAAT
GGCTCTTGTTTAGCTTCCCGGAAGACCTCCTTTATGATGGCTTTATGCCTC
AGCTCCATCTACGAGGATTTAAAGATGTACCAAGTGGAGTTCAAGACCATG
AACGCCAAGCTGCTCATGGACCCTAAACGGCAGATCTTTTTAGACCAGAAC
ATGCTGGCTGTGATTGATGAGCTGATGCAAGCTTTAAACTTCAACTCCGAG
ACCGTCCCTCAGAAGTCCTCCCTCGAGGAGCCCGATTTTTACAAGACAAAG
ATCAAACTGTGCATTTTACTCCACGCCTTTAGGATCCGGGCCGTGACCATT
GACCGGGTCATGAGCTATTTAAACGCCAGC
(Human Tissue Factor 219)
AGCGGCACAACCAACACAGTCGCTGCCTATAACCTCACTTGGAAGAGCACC
AACTTCAAAACCATCCTCGAATGGGAACCCAAACCCGTTAACCAAGTTTAC
ACCGTGCAGATCAGCACCAAGTCCGGCGACTGGAAGTCCAAATGTTTCTAT
ACCACCGACACCGAGTGCGATCTCACCGATGAGATCGTGAAAGATGTGAAA
CAGACCTACCTCGCCCGGGTGTTTAGCTACCCCGCCGGCAATGTGGAGAGC
ACTGGTTCCGCTGGCGAGCCTTTATACGAGAACAGCCCCGAATTTACCCCT
TACCTCGAGACCAATTTAGGACAGCCCACCATCCAAAGCTTTGAGCAAGTT
GGCACAAAGGTGAATGTGACAGTGGAGGACGAGCGGACTTTAGTGCGGCGG
AACAACACCTTTCTCAGCCTCCGGGATGTGTTCGGCAAAGATTTAATCTAC
ACACTGTATTACTGGAAGTCCTCTTCCTCCGGCAAGAAGACAGCTAAAACC
AACACAAACGAGTTTTTAATCGACGTGGATAAAGGCGAAAACTACTGTTTC
AGCGTGCAAGCTGTGATCCCCTCCCGGACCGTGAATAGGAAAAGCACCGAT
AGCCCCGTTGAGTGCATGGGCCAAGAAAAGGGCGAGTTCCGGGAG
(Human IL-15)
AACTGGGTGAACGTCATCAGCGATTTAAAGAAGATCGAAGATTTAATTCAG
TCCATGCATATCGACGCCACTTTATACACAGAATCCGACGTGCACCCCTCT
TGTAAGGTGACCGCCATGAAATGTTTTTTACTGGAGCTGCAAGTTATCTCT
TTAGAGAGCGGAGACGCTAGCATCCACGACACCGTGGAGAATTTAATCATT
TTAGCCAATAACTCTTTATCCAGCAACGGCAACGTGACAGAGTCCGGCTGC
AAGGAGTGCGAAGAGCTGGAGGAGAAGAACATCAAGGAGTTTCTGCAATCC
TTTGTGCACATTGTCCAGATGTTCATCAATACCTCC

### Example 19: Secretion of IL-18/IL-15RαSu and IL-12/TF/IL-15 Fusion Proteins

[1109] The IL-18/IL-15RαSu and IL-12/TF/IL-15 constructs were cloned into a pMSGV-1 modified retrovirus expression vector (Hughes, Hum Gene Ther 16:457-72, 2005 herein incorporated by reference), and the expression vector was transfected into CHO-K1 cells. Co-expression of the two constructs in CHO-K1 cells resulted in secretion of a soluble IL-12/TF/IL-15:IL-18/IL-15RαSu protein complex (referred to as 12t15/518), which can be purified by anti-TF Ab affinity and other chromatography methods.

[1110] The amino acid sequence of the IL-18/IL-15RαSu fusion protein (including signal peptide sequence) is as follows (SEQ ID NO: 322):

(Signal peptide)
MKWVTFISLLFLFSSAYS
(Human IL-18)
YFGKLESKLSVIRNLNDQVLFIDQGNRPLFEDMTDSDCRDNAPRTIFIISM
YKDSQPRGMAVTISVKCEKISTLSCENKIISFKEMNPPDNIKDTKSDIIFF
QRSVPGHDNKMQFESSSYEGYFLACEKERDLFKLILKKEDELGDRSIMFTV
QNED
(Human IL-15R α sushi domain)
ITCPPPMSVEHADIWVKSYSLYSRERYICNSGFKRKAGTSSLTECVLNKAT
NVAHWTTPLKCIR

[1111] The amino acid sequence of the IL-12/TF/IL-15 fusion protein (including leader sequence) is as follows (SEQ ID NO: 323):

(Signal peptide)
MKWVTFISLLFLFSSAYS
(Human IL-12 subunit beta (p40))
IWELKKDVYVVELDWYPDAPGEMVVLTCDTPEEDGITWTLDQSSEVLGSGK
TLTIQVKEFGDAGQYTCHKGGEVLSHSLLLLHKKEDGIWSTDILKDQKEPK
NKTFLRCEAKNYSGRFTCWWLTTISTDLTFSVKSSRGSSDPQGVTCGAATL
SAERVRGDNKEYEYSVECQEDSACPAAEESLPIEVMVDAVHKLKYENYTSS
FFIRDIIKPDPPKNLQLKPLKNSRQVEVSWEYPDTWSTPHSYFSLTFCVQV
QGKSKREKKDRVFTDKTSATVICRKNASISVRAQDRYYSSSWSEWASVPCS
(Linker)
GGGGSGGGGSGGGGS
(Human IL-12 subunit alpha (p35))
RNLPVATPDPGMFPCLHHSQNLLRAVSNMLQKARQTLEFYPCTSEEIDHED
ITKDKTSTVEACLPLELTKNESCLNSRETSFITNGSCLASRKTSFMMALCL
SSIYEDLKMYQVEFKTMNAKLLMDPKRQIFLDQNMLAVIDELMQALNFNSE
TVPQKSSLEEPDFYKTKIKLCILLHAFRIRAVTIDRVMSYLNAS
(Human Tissue Factor 219)
SGTTNTVAAYNLTWKSTNFKTILEWEPKPVNQVYTVQISTKSGDWKSKCFY
TTDTECDLTDEIVKDVKQTYLARVFSYPAGNVESTGSAGEPLYENSPEFTP
YLETNLGQPTIQSFEQVGTKVNVTVEDERTLVRRNNTFLSLRDVFGKDLIY
TLYYWKSSSSGKKTAKTNTNEFLIDVDKGENYCFSVQAVIPSRTVNRKSTD
SPVECMGQEKGEFRE
(Human IL-15)
NWVNVISDLKKIEDLIQSMHIDATLYTESDVHPSCKVTAMKCFLLELQVIS
LESGDASIHDTVENLIILANNSLSSNGNVTESGCKECEELEEKNIKEFLQS
FVHIVQMFINTS

[1112] In some cases, the leader peptide is cleaved from the intact polypeptide to generate the mature form that may be soluble or secreted.

### Example 20: Recombinant Protein Quantitation of the 18t15-12s16 Complex

[1113] The 18t15-12s16 complex (comprising IL-12/IL-15RαSu/αCD16scFv; IL-18/TF/IL-15) was detected and quantified using standard sandwich ELISA methods (FIG. 39). Anti-human tissue factor antibody/IL-2 or anti-TF Ab/IL-18 served as the capture antibody and biotinylated anti-human IL-12 or IL-18 antibody (BAF 219, D045-6, both R&D Systems) served as the detection antibody. Tissue factor was also detected using an anti-human tissue factor antibody (143), and anti-human tissue factor antibody detection.

### Example 21: Creation of TGFβRII/IL-15RαSu and IL-21/TF/IL-15 DNA Constructs

[1114] In a non-limiting example, a TGFβRII/IL-15RαSu DNA construct was created (FIG. 40). The human TGFβRII dimer and human IL-21 sequences were obtained from the UniProt website and DNA for these sequences was synthesized by Genewiz. A DNA construct was made linking the TGFβRII to another TGFβRII with a linker to generate a single chain version of TGFβRII and then directly linking the TGFβRII single chain dimer sequence to the N-terminal coding region of IL-15RαSu.

[1115] The nucleic acid sequences of the TGFβRII/IL-15RαSu construct (including signal sequence) is as follows (SEQ ID NO: 196):

(Signal peptide)
ATGAAGTGGGTGACCTTCATCAGCCTGCTGTTCCTGTTCTCCAGCGCCTAC
TCC
(Human TGFβRII-1^{st} fragment)
ATCCCCCCCCATGTGCAAAAGAGCGTGAACAACGATATGATCGTGACCGAC
AACAACGGCGCCGTGAAGTTTCCCCAGCTCTGCAAGTTCTGCGATGTCAGG
TTCAGCACCTGCGATAATCAGAAGTCCTGCATGTCCAACTGCACGATCACC
TCCATCTGCGAGAAGCCCCAAGAAGTGTGCGTGGCCGTGTGGCGGAAAAAT
GACGAGAACATCACCCTGGAGACCGTGTGTCACGACCCCAAGCTCCCTTAT
CACGACTTCATTCTGGAGGACGCTGCCTCCCCCAAATGCATCATGAAGGAG
AAGAAGAAGCCCGGAGAGACCTTCTTTATGTGTTCCTGTAGCAGCGACGAG
TGTAACGACAACATCATCTTCAGCGAAGAGTACAACACCAGCAACCCTGAT
(Linker)
GGAGGTGGCGGATCCGGAGGTGGAGGTTCTGGTGGAGGTGGGAGT
(Human TGFβRII-2^{nd} fragment)
ATTCCTCCCCACGTGCAGAAGAGCGTGAATAATGACATGATCGTGACCGAT
AACAATGGCGCCGTGAAATTTCCCCAGCTGTGCAAATTCTGCGATGTGAGG
TTTTCCACCTGCGACAACCAGAAGTCCTGTATGAGCAACTGCACAATCACC
TCCATCTGTGAGAAGCCTCAGGAGGTGTGCGTGGCTGTCTGGCGGAAGAAT
GACGAGAATATCACCCTGGAAACCGTCTGCCACGATCCCAAGCTGCCCTAC
CACGATTTCATCCTGGAAGACGCCGCCAGCCCTAAGTGCATCATGAAAGAG
AAAAAGAAGCCTGGCGAGACCTTTTTCATGTGCTCCTGCAGCAGCGACGAA
TGCAACGACAATATCATCTTTAGCGAGGAATACAATACCAGCAACCCCGAC
(Human IL-15R α sushi domain)
ATCACGTGTCCTCCTCCTATGTCCGTGGAACACGCAGACATCTGGGTCAAG
AGCTACAGCTTGTACTCCAGGGAGCGGTACATTTGTAACTCTGGTTTCAAG
CGTAAAGCCGGCACGTCCAGCCTGACGGAGTGCGTGTTGAACAAGGCCACG
AATGTCGCCCACTGGACAACCCCCAGTCTCAAATGTATTAGA

[1116] Additionally, an IL-21/TF/IL-15 construct was made linking the IL-21 sequence to the N-terminus coding region of tissue factor 219, and further linking the IL-21/TF construct to the N-terminus coding region of IL-15 (FIG. 41). The nucleic acid sequence of the IL-21/TF/IL-15 construct (including leader sequence) is as follows (SEQ ID NO: 192):

(Signal peptide)
ATGAAGTGGGTGACCTTCATCAGCCTGCTGTTCCTGTTCTCCAGCGCCTAC
TCC
(Human IL-21)
CAGGGCCAGGACAGGCACATGATCCGGATGAGGCAGCTCATCGACATCGTC
GACCAGCTGAAGAACTACGTGAACGACCTGGTGCCCGAGTTTCTGCCTGCC
CCCGAGGACGTGGAGACCAACTGCGAGTGGTCCGCCTTCTCCTGCTTTCAG
AAGGCCCAGCTGAAGTCCGCCAACACCGGCAACAACGAGCGGATCATCAAC
GTGAGCATCAAGAAGCTGAAGCGGAAGCCTCCCTCCACAAACGCCGGCAGG
AGGCAGAAGCACAGGCTGACCTGCCCCAGCTGTGACTCCTACGAGAAGAAG
CCCCCCAAGGAGTTCCTGGAGAGGTTCAAGTCCCTGCTGCAGAAGATGATC
CATCAGCACCTGTCCTCCAGGACCCACGGCTCCGAGGACTCC
(Human Tissue Factor 219)
TCCGGCACCACCAATACCGTGGCCGCTTATAACCTCACATGGAAGAGCACC
AACTTCAAGACAATTCTGGAATGGGAACCCAAGCCCGTCAATCAAGTTTAC
ACCGTGCAGATCTCCACCAAATCCGGAGACTGGAAGAGCAAGTGCTTCTAC
ACAACAGACACCGAGTGTGATTTAACCGACGAAATCGTCAAGGACGTCAAG
CAAACCTATCTGGCTCGGGTCTTTTCCTACCCCGCTGGCAATGTCGAGTCC
ACCGGCTCCGCTGGCGAGCCTCTCTACGAGAATTCCCCCGAATTCACCCCT
TATTTAGAGACCAATTTAGGCCAGCCTACCATCCAGAGCTTCGAGCAAGTT
GGCACCAAGGTGAACGTCACCGTCGAGGATGAAAGGACTTTAGTGCGGCGG
AATAACACATTTTTATCCCTCCGGGATGTGTTCGGCAAAGACCTCATCTAC
ACACTGTACTATTGGAAGTCCAGCTCCTCCGGCAAAAAGACCGCTAAGACC
AACACCAACGAGTTTTTAATTGACGTGGACAAAGGCGAGAACTACTGCTTC
AGCGTGCAAGCCGTGATCCCTTCTCGTACCGTCAACCGGAAGAGCACAGAT
TCCCCCGTTGAGTGCATGGGCCAAGAAAAGGGCGAGTTCCGGGAG
(Human IL-15)
AACTGGGTGAACGTCATCAGCGATTTAAAGAAGATCGAAGATTTAATTCAG
TCCATGCATATCGACGCCACTTTATACACAGAATCCGACGTGCACCCCTCT
TGTAAGGTGACCGCCATGAAATGTTTTTTACTGGAGCTGCAAGTTATCTCT
TTAGAGAGCGGAGACGCTAGCATCCACGACACCGTGGAGAATTTAATCATT
TTAGCCAATAACTCTTTATCCAGCAACGGCAACGTGACAGAGTCCGGCTGC
AAGGAGTGCGAAGAGCTGGAGGAGAAGAACATCAAGGAGTTTCTGCAATCC
TTTGTGCACATTGTCCAGATGTTCATCAATACCTCC

### Example 22: Secretion of TGFβRII/IL-15RαSu and IL-21/TF/IL-15 Fusion Proteins

[1117] The TGFβRII/IL-15RαSu and IL-21/TF/IL-15 DNA constructs were cloned into a pMSGV-1 modified retrovirus expression vector (as described in Hughes et al., Hum Gene Ther 16:457-72, 2005, herein incorporated by reference), and the expression vector was transfected into CHO-K1 cells. Co-expression of the two constructs in CHO-K1 cells resulted in secretion of the soluble IL-21/TF/IL-15:TGFβRII/IL-15RαSu protein complex (referred to as 21t15-TGFRs; FIG. 42 and FIG. 43). The 21t15-TGFRs complex was purified from CHO-K1 cell culture supernatant using anti-TF antibody affinity chromatography and other chromatography methods.

[1118] The amino acid sequence of the TGFβRII/IL-15RαSu construct (including signal peptide sequence) is as follows (SEQ ID NO: 195):

(Signal peptide)
MKWVTFISLLFLFSSAYS
(Human TGFβRII-1st fragment)
IPPHVQKSVNNDMIVTDNNGAVKFPQLCKFCDVRFSTCDNQKSCMSNCSIT
SICEKPQEVCVAVWRKNDENITLETVCHDPKLPYHDFILEDAASPKCIMKE
KKKPGETFFMCSCSSDECNDNIIFSEEYNTSNPD
(Linker)
GGGGSGGGGSGGGGS
(Human TGFβRII-2nd fragment)
IPPHVQKSVNNDMIVTDNNGAVKFPQLCKFCDVRFSTCDNQKSCMSNCSIT
SICEKPQEVCVAVWRKNDENITLETVCHDPKLPYHDFILEDAASPKCIMKE
KKKPGETFFMCSCSSDECNDNIIFSEEYNTSNPD
(Human IL-15R α sushi domain)
ITCPPPMSVEHADIWVKSYSLYSRERYICNSGFKRKAGTSSLTECVLNKAT
NVAHWTTPSLKCIR

[1119] The amino acid sequence of the mature IL-21/TF/IL-15 fusion protein (including signal peptide sequence) is as follows (SEQ ID NO: 191):

(Signal peptide)
MKWVTFISLLFLFSSAYS
(Human IL-21)
[sequence omitted]
(Human Tissue Factor 219)
SGTTNTVAAYNLTWKSTNFKTILEWEPKPVNQVYTVQISTKSGDWKSKCFY
TTDTECDLTDEIVKDVKQTYLARVFSYPAGNVESTGSAGEPLYENSPEFTP
YLETNLGQPTIQSFEQVGTKVNVTVEDERTLVRRNNTFLSLRDVFGKDLIY
TLYYWKSSSSGKKTAKTNTNEFLIDVDKGENYCFSVQAVIPSRTVNRKSTD
SPVECMGQEKGEFRE
(Human IL-15)
NWVNVISDLKKIEDLIQSMHIDATLYTESDVHPSCKVTAMKCFLLELQVIS
LESGDASIHDTVENLIILANNSLSSNGNVTESGCKECEELEEKNIKEFLQS
FVHIVQMFINTS

[1120] In some cases, the leader peptide is cleaved from the intact polypeptide to generate a mature form that may be soluble or secreted.

### Example 23: Purification of 21t15-TGFRs by Immunoaffinity Chromatography

[1121] An anti-TF antibody affinity column was connected to a GE Healthcare AKTA™ Avant protein purification system. The flow rate was 4 mL/min for all steps except the elution step, which was 2 mL/min.

[1122] Cell culture harvest of 21t15-TGFRs was adjusted to pH 7.4 with 1M Tris base and loaded onto the anti-TF antibody affinity column equilibrated with 5 column volumes of PBS. After loading the sample, the column was washed with 5 column volumes PBS, followed by elution with 6 column volumes 0.1M acetic acid, pH 2.9. Absorbance at 280 nm was collected and then the sample was then neutralized to pH 7.5-8.0 by adding 1M Tris base. The neutralized sample was then buffer exchanged into PBS using Amicon® centrifugal filters with a 30 KDa molecular weight cutoff. FIG. 44 shows that the 21t15-TGFRs complex binds anti-TF antibody affinity column, wherein TF is a 21t15-TGFRs binding partner. The buffer-exchanged protein sample is stored at 2-8° C. for further biochemical analysis and biological activity testing.

[1123] After each elution, the anti-TF antibody affinity column was then stripped using 6 column volumes 0.1M glycine, pH 2.5. The column was then neutralized using 10 column volumes PBS, 0.05% sodium azide, and stored at 2-8° C.

### Example 24: Size Exclusion Chromatography of 21t15-TGFRs

[1124] A GE Healthcare Superdex® 200 Increase 10/300 GL gel filtration column was connected to a GE Healthcare AKTA™ Avant protein purification system. The column was equilibrated with 2 column volumes of PBS. The flow rate was 0.8 mL/min. A capillary loop was used to inject 2004, of 1 mg/mL of 21t15-TGFRs complex onto the column. The injection was then chased with 1.25 column volumes of PBS. The SEC chromatograph was shown in FIG. 45. There were two protein peaks, likely representing a monomer and dimer forms of 21t15-TGFRs.

### Example 25: SDS-PAGE of 21t15-TGFRs

[1125] To determine the purity and protein molecular weight, the purified 21t15-TGFRs complex protein sample was analyzed using 4-12% NuPage Bis-Tris protein gel SDS-PAGE under reduced conditions. The gel was stained with InstantBlue™ for about 30 min, followed by destaining overnight in purified water. FIG. 46 shows an example SDS gel of anti-TF antibody affinity purified 21t15-TGFRs, with bands at 39.08 kDa and 53 kDa. Glycosylation of 21t15-TGFRs in CHO cells was confirmed using the Protein Deglycosylation Mix II kit (New England Biolabs) and the manufacturer's instructions. Deglycosylation reduces the molecular weight of 21t15-TGFRs, as seen in lane 4 of FIG. 46.

### Example 26: Recombinant Protein Quantitation of 21t15-TGFRs Complexes

[1126] The 21t15-TGFRs complex was detected and quantified using standard sandwich ELISA methods (FIGS. 47-50). Anti-human tissue factor antibody served as the capture antibody and biotinylated anti-human IL-21, IL-15, or TGFβRII served as the detection antibody. Tissue factor was also detected using an anti-human tissue factor capture antibody (143), and anti-human tissue factor antibody detection. The 143/anti-TF antibody ELISA was compared to purified tissue factor at similar concentrations.

### Example 27: Immunostimulatory Capacity of the 21t15-TGFRs Complex

[1127] To assess the IL-15 immunostimulatory activity of the 21t15-TGFRs complexes, increasing concentrations of 21t15-TGFRs was added to 32Dβ cells (10⁴ cell/well) in 200 μL IMDM:10% FBS media and cells were incubated for 3 days at 37° C. On the fourth day, WST-1 proliferation reagent (10 μL/well) then was added and after 4 hours, absorbance was measured at 450 nm to determine cell proliferation based on cleavage of WST-1 to a soluble formazan dye. Bioactivity of the human recombinant IL-15 was assessed as a positive control. As shown in FIG. 51, 21t15-TGFRs demonstrated IL-15-dependent 32Dβ cell proliferation. The 21t15-TGFRs complex was reduced compared to that of human recombinant IL-15, possibly due to the linkage of IL-21 and tissue factor to the IL-15 domain.

[1128] Additionally, HEK-Blue TGFβ reporter cells (hkb-tgfb, InvivoGen) were used to measure the ability of 21t15-TGFRs to block TGFβ1 activity (FIG. 52). Increasing concentrations of 21t15-TGFRs were mixed with 0.1 nM of TGFβ1 and added to HEK-Blue TGFβ reporter cells (2.5×10⁴ cell/well) in 200 μL IMDM:10% heat-inactivated FBS media. Cells were incubated overnight at 37° C. The next day, 20 μl of induced HEK-Blue TGFβ reporter cell supernatant was added to 180 μl of QUANTI-Blue (InvivoGen) and incubated for 1-3 hours at 37° C. 21t15-TGFRs activity was assessed by measuring absorbance at 620 nm. Human recombinant TGFβRII/Fc activity was assessed as a positive control.

[1129] These results demonstrate that TGFβRII domain of the 21t15-TGFRs complex retains its ability to trap TGFβ1. The ability of 21t15-TGFRs to block TGFβ1 activity was reduced compared to that of human recombinant TGFβRII/Fc, possibly due to the linkage of TGFβRII to the IL-15Rα sushi domain.

### Example 28: Induction of Cytokine-Induced Memory-Like NK Cells by the 21t15-TGFRs Complex

[1130] Cytokine-induced memory-like NK cells can be induced ex vivo following overnight stimulation of purified NK cells with saturating amounts of cytokines. These memory-like properties can be measured through expression of IL-2 receptor a (IL-2Ra, CD25), CD69 (and other activation markers), and increased IFN-γ production. To evaluate the ability of 21t15-TGFRs complexes to promote generation of cytokine-induced memory-like NK cells, purified human NK cells (>95% CD56+) were stimulated for 14-18 hours with 1 nM to 100 nM of the 21t15-TGFRs complex. Cell-surface CD25 and CD 69 expression and intracellular IFN-γ levels were assessed by antibody-staining and flow cytometry.

[1131] Fresh human leukocytes were obtained from a blood bank and CD56+NK cells were isolated with the RosetteSep/human NK cell reagent (StemCell Technologies). The purity of NK cells was >70% and confirmed by staining with CD56-BV421, CD16-BV510, CD25-PE, CD69-APCFire750 specific antibodies (BioLegend). Cells were counted and resuspended in 0.2×10⁶/mL in a 96 well flat bottom plate in 0.2 mL of complete media (RPMI 1640 (Gibco), supplemented with 2 mM L-glutamine (Thermo Life Technologies), penicillin (Thermo Life Technologies), streptomycin (Thermo Life Technologies), and 10% FBS (Hyclone)). Cells were stimulated with either mix-cytokines of hIL-21 (50 ng/ml) (Biolegend) and hIL-15 (50 ng/ml) (NCI) or with 1 nM, 10 nM, or 100 nM 21t15-TGFRs complex overnight at 37° C., 5% CO₂ for 14-18 hrs. The cells were then harvested and surface stained for CD56-BV421, CD16-BV510, CD25-PE, CD69-APCFire750 specific antibodies for 30 minutes. After staining, cells were washed (1500 RPM for 5 minutes at room temperature) in FACS buffer (1×PBS (Hyclone) with 0.5% BSA (EMD Millipore) and 0.001% sodium azide (Sigma)). After two washes, cells were analyzed using a BD FACSCelesta™ flow cytometer. (Plotted Data-Mean Fluorescence Intensity; FIG. 53 and FIG. 54).

[1132] Fresh human leukocytes were obtained from a blood bank and CD56+NK cells were isolated with the RosetteSep/human NK cell reagent (StemCell Technologies). The purity of NK cells was >70% and confirmed by staining with CD56-BV421, CD16-BV510, CD25-PE, CD69-APCFire750 specific antibodies (BioLegend). Cells were counted and resuspended in 0.2×106/ml in a 96 well flat bottom plate in 0.2 mL of complete media (RPMI 1640 (Gibco), supplemented with 2 mM L-glutamine (Thermo Life Technologies), penicillin (Thermo Life Technologies), streptomycin (Thermo Life Technologies), and 10% FBS (Hyclone)). Cells were stimulated with either mix-cytokines of hIL-21 (50 ng/ml) (Biolegend) and hIL-15 (50 ng/ml) (NCI) or with 1 nM, 10 nM, or 100 nM 21t15-TGFRs complex overnight at 37° C., 5% CO₂ for 14-18 hrs. The cells were then treated with 10 μg/ml of Brefeldin A (Sigma) and 1× of Monensin (eBioscience) for 4 hrs. Cells were harvested and surface stained for CD56-BV421, CD16-BV510, CD25-PE, CD69-APCFire750 specific antibodies for 30 minutes. After staining, cells were washed (1500 RPM for 5 minutes at room temperature) in FACS buffer (1×PBS (Hyclone) with 0.5% BSA (EMD Millipore) and 0.001% sodium azide (Sigma)) and fixed for 10 minutes at room temperature. After fixation, cells were washed (1500 RPM for 5 minutes at room temperature) with 1× permeabilized buffer (eBioscience) and stained for intracellular IFN-γ-PE (Biolegend) for 30 minutes at room temperature. Cells were washed once again with 1× permeabilized buffer and then washed with FACS buffer. Cell pellets were resuspended in 300 μls of FACS Buffer and analyzed using a BD FACSCelesta™ flow cytometer. (Plotted % of IFN-γ Positive Cells; FIG. 55).

### Example 29: In Vitro Cytotoxicity of NK Cells Against Human Tumor Cells

[1133] K562 (CellTrace violet labelled), human myelogenous leukemia cells, were incubated with purified human NK cells (using StemCell human NK cell purification kit (E:T ratio; 2:1)) in the presence of increasing concentrations of the 21t15-TGFRs complex. After 20 hours, the cultures were harvested, stained with propidium iodide (PI), and assessed by flow cytometry. As shown in FIG. 56, the 21t15-TGFRs complex induced human NK cytotoxicity against K562, as compared to control.

### Example 30: Creation of an IL-21/TF Mutant/IL-15 DNA Construct and Resulting Fusion Protein Complex with TGFβRII/IL-15RαSu

[1134] In a non-limiting example, an IL-21/TF mutant/IL-15 DNA construct was made by linking IL-21 directly to the N-terminus coding region of a tissue factor 219 mutant, and further linking the IL-21/TF mutant to the N-terminus coding region of IL-15.

[1135] The nucleic acid sequence of the IL-21/TF mutant/IL-15 construct (including signal peptide sequence) is as follows (SEQ ID NO: 324, shaded nucleotides are mutant and the mutant codons are underlined):

(Signal sequence)
ATGAAGTGGGTGACCTTCATCAGCCTGCTGTTCCTGTTCTCCAGCGCCT
ACTCC
(Human IL-21)
CAGGGCCAGGACAGGCACATGATCCGGATGAGGCAGCTCATCGACAT
CGTCGACCAGCTGAAGAACTACGTGAACGACCTGGTGCCCGAGTTTCTGCC
TGCCCCCGAGGACGTGGAGACCAACTGCGAGTGGTCCGCCTTCTCCTGCTT
TCAGAAGGCCCAGCTGAAGTCCGCCAACACCGGCAACAACGAGCGGATCAT
CAACGTGAGCATCAAGAAGCTGAAGCGGAAGCCTCCCTCCACAAACGCCGG
CAGGAGGCAGAAGCACAGGCTGACCTGCCCCAGCTGTGACTCCTACGAGAA
GAAGCCCCCCAAGGAGTTCCTGGAGAGGTTCAAGTCCCTGCTGCAGAAGAT
GATCCATCAGCACCTGTCCTCCAGGACCCACGGCTCCGAGGACTCC
(Human Tissue Factor 219 mutants)
TCCGGCACCACCAATACCGTGGCCGCTTATAACCTCACATGGAAGAGC

[chemical structure]

TACACCGTGCAGATCTCCACCAAATCCGGAGACTGGAAGAGCAAGTGCTTC

[chemical structure]

AAGCAAACCTATCTGGCTCGGGTCTTTTCCTACCCCGCTGGCAATGTCGAG
TCCACCGGCTCCGCTGGCGAGCCTCTCTACGAGAATTCCCCCGAATTCACC
CCTTATTTAGAGACCAATTTAGGCCAGCCTACCATCCAGAGCTTCGAGCAA

[chemical structure]

[chemical structure]

TACACACTGTACTATTGGAAGTCCAGCTCCTCCGGCAAAAAGACCGCTAAG
ACCAACACCAACGAGTTTTTAATTGACGTGGACAAAGGCGAGAACTACTGC
TTCAGCGTGCAAGCCGTGATCCCTTCTCGTACCGTCAACCGGAAGAGCACA
GATTCCCCCGTTGAGTGCATGGGCCAAGAAAAGGGCGAGTTCCGGGAG
(Human IL-15)
AACTGGGTGAACGTCATCAGCGATTTAAAGAAGATCGAAGATTTAATT
CAGTCCATGCATATCGACGCCACTTTATACACAGAATCCGACGTGCACCCC
TCTTGTAAGGTGACCGCCATGAAATGTTTTTTACTGGAGCTGCAAGTTATC
TCTTTAGAGAGCGGAGACGCTAGCATCCACGACACCGTGGAGAATTTAATC
ATTTTAGCCAATAACTCTTTATCCAGCAACGGCAACGTGACAGAGTCCGGC
TGCAAGGAGTGCGAAGAGCTGGAGGAGAAGAACATCAAGGAGTTTCTGCAA
TCCTTTGTGCACATTGTCCAGATGTTCATCAATACCTCC

[1136] The amino acid sequence of the IL-21/TF mutant/IL-15 construct (including signal peptide sequence) is as follows (SEQ ID NO: 325, substituted residues are shaded):

(Signal peptide)
MKWVTFISLLFLFSSAYS
(Human IL-21)
[sequence omitted]
(Human Tissue Factor 219)

[chemical structure]

[chemical structure]

[chemical structure]

IYTLYYWKSSSSGKKTAKTNTNEFLIDVDKGENYCFSVQAVIPSRTVNRK
STDSPVECMGQEKGEFRE
(Human IL-15)
NWVNVISDLKKIEDLIQSMHIDATLYTESDVHPSCKVTAMKCFLLELQVIS
LESGDASIHDTVENLIILANNSLSSNGNVTESGCKECEELEEKNIKEFLQS
FVHIVQMFINTS

[1137] In some cases, the leader peptide is cleaved from the intact polypeptide to generate a mature form that may be soluble or secreted.

[1138] In some embodiments, the IL-21/TF mutant/IL-15 DNA construct may be combined with an TGFβRII/IL-15RαSu DNA construct, transfected into cells using a retroviral vector as described above, and expressed as IL-21/TF mutant/IL-15 and TGFβRII/IL-15RαSu fusion proteins. The IL-15RαSu domain of the TGFβRII/IL-15RαSu fusion protein binds to the IL-15 domain of the IL-21/TF mutant/IL-15 fusion protein to create an IL-21/TF mutant/IL-15:TGFβRII/IL-15RαSu complex.

### Example 31: Creation of IL-21/IL-15RαSu and TGFβRII/TF/IL-15 DNA Constructs and the Resulting Fusion Protein Complex

[1139] In a non-limiting example, an IL-21/IL-15RαSu DNA construct was made by linking IL-21 directly to the IL-15RαSu subunit sequence. The nucleic acid sequence of the IL-21/IL-15RαSu construct (including signal sequence) is as follows (SEQ ID NO: 214):

(Signal sequence)
ATGAAGTGGGTGACCTTCATCAGCCTGCTGTTCCTGTTCTCCAGCGCCTAC
TCC
(Human IL-21)
CAGGGCCAGGACAGGCACATGATCCGGATGAGGCAGCTCATCGACATCGTC
GACCAGCTGAAGAACTACGTGAACGACCTGGTGCCCGAGTTTCTGCCTGCC
CCCGAGGACGTGGAGACCAACTGCGAGTGGTCCGCCTTCTCCTGCTTTCAG
AAGGCCCAGCTGAAGTCCGCCAACACCGGCAACAACGAGCGGATCATCAAC
GTGAGCATCAAGAAGCTGAAGCGGAAGCCTCCCTCCACAAACGCCGGCAGG
AGGCAGAAGCACAGGCTGACCTGCCCCAGCTGTGACTCCTACGAGAAGAAG
CCCCCCAAGGAGTTCCTGGAGAGGTTCAAGTCCCTGCTGCAGAAGATGATC
CATCAGCACCTGTCCTCCAGGACCCACGGCTCCGAGGACTCC
(Human IL-15R α sushi domain)
ATTACATGCCCCCCTCCCATGAGCGTGGAGCACGCCGACATCTGGGTGAAG
AGCTATAGCCTCTACAGCCGGGAGAGGTATATCTGTAACAGCGGCTTCAAG
AGGAAGGCCGGCACCAGCAGCCTCACCGAGTGCGTGCTGAATAAGGCTACC
AACGTGGCTCACTGGACAACACCCTCTTTAAAGTGCATCCGG

[1140] The amino acid sequence of the IL-21/IL-15RαSu construct (including signal peptide sequence) is as follows (SEQ ID NO: 213):

(Signal peptide)
MKWVTFISLLFLFSSAYS
(Human IL-21)
[sequence omitted]
(Human IL-15R a sushi domain)
ITCPPPMSVEHADIWVKSYSLYSRERYICNSGFKRKAGTSSLTECVLNKAT
NVAHWTTPSLKCIR

[1141] In some cases, the leader peptide is cleaved from the intact polypeptide to generate a mature form that may be soluble or secreted.

[1142] In some embodiments, the IL-21/IL-15RαSu DNA construct may be combined with a TGFβRII/TF/IL-15 DNA construct, transfected into a retroviral vector as described above, and expressed as IL-21/IL-15RαSu and TGFβRII/TF/IL-15 fusion proteins. The IL-15RαSu domain of the IL-21/IL-15RαSu fusion protein binds to the IL-15 domain of the TGFβRII/TF/IL-15 fusion protein to create a TGFβRII/TF/IL-15:IL-21/IL-15RαSu complex.

[1143] The TGFβRII/TF/IL-15RαSu DNA construct was created by linking the TGFβRII sequence to the N-terminus coding region of human tissue factor 219 form, and then linking the TGFβRII/TF construct to the N-terminus coding region of IL-15. As described above, a single-chain version of TGFβRII (TGFβRII-linker-TGFβRII) was used. The nucleic acid sequence of the TGFβRII/TF/IL-15 construct (including leader sequence) is as follows (SEQ ID NO: 239):

(Signal peptide)
ATGAAGTGGGTGACCTTCATCAGCCTGCTGTTCCTGTTCTCCAGCGCCTAC
TCC
(Human TGFβII-1^{st} fragment)
ATCCCCCCCCATGTGCAAAAGAGCGTGAACAACGATATGATCGTGACCGAC
AACAACGGCGCCGTGAAGTTTCCCCAGCTCTGCAAGTTCTGCGATGTCAGG
TTCAGCACCTGCGATAATCAGAAGTCCTGCATGTCCAACTGCACGATCACC
TCCATCTGCGAGAAGCCCCAAGAAGTGTGCGTGGCCGTGTGGCGGAAAAAT
GACGAGAACATCACCCTGGAGACCGTGTGTCACGACCCCAAGCTCCCTTAT
CACGACTTCATTCTGGAGGACGCTGCCTCCCCCAAATGCATCATGAAGGAG
AAGAAGAAGCCCGGAGAGACCTTCTTTATGTGTTCCTGTAGCAGCGACGAG
TGTAACGACAACATCATCTTCAGCGAAGAGTACAACACCAGCAACCCTGAT
(Linker)
GGAGGTGGCGGATCCGGAGGTGGAGGTTCTGGTGGAGGTGGGAGT
(Human TGFβRII-2^{nd} fragment)
ATTCCTCCCCACGTGCAGAAGAGCGTGAATAATGACATGATCGTGACCGAT
AACAATGGCGCCGTGAAATTTCCCCAGCTGTGCAAATTCTGCGATGTGAGG
TTTTCCACCTGCGACAACCAGAAGTCCTGTATGAGCAACTGCACAATCACC
TCCATCTGTGAGAAGCCTCAGGAGGTGTGCGTGGCTGTCTGGCGGAAGAAT
GACGAGAATATCACCCTGGAAACCGTCTGCCACGATCCCAAGCTGCCCTAC
CACGATTTCATCCTGGAAGACGCCGCCAGCCCTAAGTGCATCATGAAAGAG
AAAAAGAAGCCTGGCGAGACCTTTTTCATGTGCTCCTGCAGCAGCGACGAA
TGCAACGACAATATCATCTTTAGCGAGGAATACAATACCAGCAACCCCGAC
(Human Tissue Factor 219)
TCCGGCACCACCAATACCGTGGCCGCTTATAACCTCACATGGAAGAGCACC
AACTTCAAGACAATTCTGGAATGGGAACCCAAGCCCGTCAATCAAGTTTAC
ACCGTGCAGATCTCCACCAAATCCGGAGACTGGAAGAGCAAGTGCTTCTAC
ACAACAGACACCGAGTGTGATTTAACCGACGAAATCGTCAAGGACGTCAAG
CAAACCTATCTGGCTCGGGTCTTTTCCTACCCCGCTGGCAATGTCGAGTCC
ACCGGCTCCGCTGGCGAGCCTCTCTACGAGAATTCCCCCGAATTCACCCCT
TATTTAGAGACCAATTTAGGCCAGCCTACCATCCAGAGCTTCGAGCAAGTT
GGCACCAAGGTGAACGTCACCGTCGAGGATGAAAGGACTTTAGTGCGGCGG
AATAACACATTTTTATCCCTCCGGGATGTGTTCGGCAAAGACCTCATCTAC
ACACTGTACTATTGGAAGTCCAGCTCCTCCGGCAAAAAGACCGCTAAGACC
AACACCAACGAGTTTTTAATTGACGTGGACAAAGGCGAGAACTACTGCTTC
AGCGTGCAAGCCGTGATCCCTTCTCGTACCGTCAACCGGAAGAGCACAGAT
TCCCCCGTTGAGTGCATGGGCCAAGAAAAGGGCGAGTTCCGGGAG
(Human IL-15)
AACTGGGTGAACGTCATCAGCGATTTAAAGAAGATCGAAGATTTAATTCAG
TCCATGCATATCGACGCCACTTTATACACAGAATCCGACGTGCACCCCTCT
TGTAAGGTGACCGCCATGAAATGTTTTTTACTGGAGCTGCAAGTTATCTCT
TTAGAGAGCGGAGACGCTAGCATCCACGACACCGTGGAGAATTTAATCATT
TTAGCCAATAACTCTTTATCCAGCAACGGCAACGTGACAGAGTCCGGCTGC
AAGGAGTGCGAAGAGCTGGAGGAGAAGAACATCAAGGAGTTTCTGCAATCC
TTTGTGCACATTGTCCAGATGTTCATCAATACCTCC

[1144] The amino acid sequence of the TGFβRII/TF/IL-15 fusion protein (including signal peptide) is as follows (SEQ ID NO: 238):

(Signal peptide)
MKWVTFISLLFLFSSAYS
(Human TGFβII-1^{st} fragment)
IPPHVQKSVNNDMIVTDNNGAVKFPQLCKFCDVRFSTCDNQKSCMSNCSTI
SICEKPQEVCVAVWRKNDENITLETVCHDPKLPYHDFILEDAASPKCIMKE
KKKPGETFFMCSCSSDECNDNIIFSEEYNTSNPD
(Linker)
GGGGSGGGGSGGGGS
(Human TGFβRII-2^{nd} fragment)
IPPHVQKSVNNDMIVTDNNGAVKFPQLCKFCDVRFSTCDNQKSCMSNCSTI
SICEKPQEVCVAVWRKNDENITLETVCHDPKLPYHDFILEDAASPKCIMKE
KKKPGETFFMCSCSSDECNDNIIFSEEYNTSNPD
(Human Tissue Factor 219)
SGTTNTVAAYNLTWKSTNFKTILEWEPKPVNQVYTVQISTKSGDWKSKCFY
TTDTECDLTDEIVKDVKQTYLARVFSYPAGNVESTGSAGEPLYENSPEFTP
YLETNLGQPTIQSFEQVGTKVNVTVEDERTLVRRNNTFLSLRDVFGKDLIY
TLYYWKSSSSGKKTAKTNTNEFLIDVDKGENYCFSVQAVIPSRTVNRKSTD
SPVECMGQEKGEFRE
(Human IL-15)
NWVNVISDLKKIEDLIQSMHIDATLYTESDVHPSCKVTAMKCFLLELQVIS
LESGDASIHDTVENLIILANNSLSSNGNVTESGCKECEELEEKNIKEFLQS
FVHIVQMFINTS

### Example 32. Production of an Exemplary Single-Chain Chimeric Polypeptides

[1145] An exemplary single-chain chimeric polypeptide including a first target-binding domain that is an anti-CD3 scFv, a soluble human tissue factor domain, and a second target-binding domain that is an anti-CD28 scFv was generated (αCD3scFv/TF/αCD28scFv) (FIG. 57). The nucleic acid and amino acid sequences of this single-chain chimeric polypeptide are shown below.

[1146] Nucleic Acid Encoding Exemplary Single-Chain Chimeric Polypeptide (αCD3scFv/TF/αCD28scFv) (SEQ ID NO: 158)

(Signal peptide)
ATGAAGTGGGTGACCTTCATCAGCTTATTATTTTTATTCAGCTCCGCCTAT
TCC
(αCD3 light chain variable region)
CAGATCGTGCTGACCCAAAGCCCCGCCATCATGAGCGCTAGCCCCGGTGAG
AAGGTGACCATGACATGCTCCGCTTCCAGCTCCGTGTCCTACATGAACTGG
TATCAGCAGAAAAGCGGAACCAGCCCCAAAAGGTGGATCTACGACACCAGC
AAGCTGGCCTCCGGAGTGCCCGCTCATTTCCGGGGCTCTGGATCCGGCACC
AGCTACTCTTTAACCATTTCCGGCATGGAAGCTGAAGACGCTGCCACCTAC
TATTGCCAGCAATGGAGCAGCAACCCCTTCACATTCGGATCTGGCACCAAG
CTCGAAATCAATCGT
(Linker)
GGAGGAGGTGGCAGCGGCGGCGGTGGATCCGGCGGAGGAGGAAGC
(αCD3 heavy chain variable region)
CAAGTTCAACTCCAGCAGAGCGGCGCTGAACTGGCCCGGCCCGGCGC
CTCCGTCAAGATGAGCTGCAAGGCTTCCGGCTATACATTTACTCGTTACAC
AATGCATTGGGTCAAGCAGAGGCCCGGTCAAGGTTTAGAGTGGATCGGATA
TATCAACCCTTCCCGGGGCTACACCAACTATAACCAAAAGTTCAAGGATAA
AGCCACTTTAACCACTGACAAGAGCTCCTCCACCGCCTACATGCAGCTGTC
CTCTTTAACCAGCGAGGACTCCGCTGTTTACTACTGCGCTAGGTATTACGA
CGACCACTACTGTTTAGACTATTGGGGACAAGGTACCACTTTAACCGTCAG
CAGC
(Human tissue factor 219 form)
TCCGGCACCACCAATACCGTGGCCGCTTATAACCTCACATGGAAGAGCACC
AACTTCAAGACAATTCTGGAATGGGAACCCAAGCCCGTCAATCAAGTTTAC
ACCGTGCAGATCTCCACCAAATCCGGAGACTGGAAGAGCAAGTGCTTCTAC
ACAACAGACACCGAGTGTGATTTAACCGACGAAATCGTCAAGGACGTCAAG
CAAACCTATCTGGCTCGGGTCTTTTCCTACCCCGCTGGCAATGTCGAGTCC
ACCGGCTCCGCTGGCGAGCCTCTCTACGAGAATTCCCCCGAATTCACCCCT
TATTTAGAGACCAATTTAGGCCAGCCTACCATCCAGAGCTTCGAGCAAGTT
GGCACCAAGGTGAACGTCACCGTCGAGGATGAAAGGACTTTAGTGCGGCGG
AATAACACATTTTTATCCCTCCGGGATGTGTTCGGCAAAGACCTCATCTAC
ACACTGTACTATTGGAAGTCCAGCTCCTCCGGCAAAAAGACCGCTAAGACC
AACACCAACGAGTTTTTAATTGACGTGGACAAAGGCGAGAACTACTGCTTC
AGCGTGCAAGCCGTGATCCCTTCTCGTACCGTCAACCGGAAGAGCACAGAT
TCCCCCGTTGAGTGCATGGGCCAAGAAAAGGGCGAGTTCCGGGAG
(αCD28 light chain variable region)
GTCCAGCTGCAGCAGAGCGGACCCGAACTCGTGAAACCCGGTGCTTCCGTG
AAAATGTCTTGTAAGGCCAGCGGATACACCTTCACCTCCTATGTGATCCAG
TGGGTCAAACAGAAGCCCGGACAAGGTCTCGAGTGGATCGGCAGCATCAAC
CCTTACAACGACTATACCAAATACAACGAGAAGTTTAAGGGAAAGGCTACT
TTAACCTCCGACAAAAGCTCCATCACAGCCTACATGGAGTTCAGCTCTTTA
ACATCCGAGGACAGCGCTCTGTACTATTGCGCCCGGTGGGGCGACGGCAAT
TACTGGGGACGGGGCACAACACTGACCGTGAGCAGC
(Linker)
GGAGGCGGAGGCTCCGGCGGAGGCGGATCTGGCGGTGGCGGCTCC
(αCD28 light chain variable region)
GACATCGAGATGACCCAGTCCCCCGCTATCATGTCCGCCTCTTTAGGCGAG
CGGGTCACAATGACTTGTACAGCCTCCTCCAGCGTCTCCTCCTCCTACTTC
CATTGGTACCAACAGAAACCCGGAAGCTCCCCTAAACTGTGCATCTACAGC
ACCAGCAATCTCGCCAGCGGCGTGCCCCCTAGGTTTTCCGGAAGCGGAAGC
ACCAGCTACTCTTTAACCATCTCCTCCATGGAGGCTGAGGATGCCGCCACC
TACTTTTGTCACCAGTACCACCGGTCCCCCACCTTCGGAGGCGGCACCAAA
CTGGAGACAAAGAGG

### Exemplary Single-Chain Chimeric Polypeptide (αCD3scFv/TF/αCD28scFv) (SEQ ID NO: 157)

(Signal peptide)
MKWVTFISLLFLFSSAYS
(αCD3 light chain variable region)
QIVLTQSPAIMSASPGEKVTMTCSASSSVSYMNWYQQKSGTSPKRWIYDTS
KLASGVPAHFRGSGSGTSYSLTISGMEAEDAATYYCQQWSSNPFTFGSGTK
LEINR
(Linker)
GGGGSGGGGSGGGGS
(αCD3 heavy chain variable region)
[sequence omitted]
(Human tissue factor 219)
SGTTNTVAAYNLTWKSTNFKTILEWEPKPVNQVYTVQISTKSGDWKSKCFY
TTDTECDLTDEIVKDVKQTYLARVFSYPAGNVESTGSAGEPLYENSPEFTP
YLETNLGQPTIQSFEQVGTKVNVTVEDERTLVRRNNTFLSLRDVFGKDLIY
TLYYWKSSSSGKKTAKTNTNEFLIDVDKGENYCFSVQAVIPSRTVNRKSTD
SPVECMGQEKGEFRE
(αCD28 light chain variable region)
VQLQQSGPELVKPGASVKMSCKASGYTFTSYVIQWVKQKPGQGLEWIGSIN
PYNDYTKYNEKFKGKATLTSDKSSITAYMEFSSLTSEDSALYYCARWGDGN
YWGRGTTLTVSS
(Linker)
GGGGSGGGGSGGGGS
(αCD28 heavy chain variable region)
DIEMTQSPAIMSASLGERVTMTCTASSSVSSSYFHWYQQKPGSSPKLCIYS
TSNLASGVPPRFSGSGSTSYSLTISSMEAEDAATYFCHQYHRSPTFGGGTK
LETKR

[1148] A second exemplary single-chain chimeric polypeptide including a first target-binding domain that is an anti-CD28 scFv, a soluble human tissue factor domain, and a second target-binding domain that is an anti-CD3 scFv was generated (αCD28scFv/TF/αCD3scFv) (FIG. 57). The nucleic acid and amino acid sequences of this single-chain chimeric polypeptide are shown below.

### Nucleic Acid Encoding Exemplary Single-Chain Chimeric Polypeptide (αCD28scFv/TF/αCD3scFv) (SEQ ID NO: 326)

(Signal peptide)
ATGAAATGGGTCACCTTCATCTCTTTACTGTTTTTATTTAGCAGCGCCTAC
AGC
(αCD28 light chain variable region)
GTGCAGCTGCAGCAGTCCGGACCCGAACTGGTCAAGCCCGGTGCCTCCGTG
AAAATGTCTTGTAAGGCTTCTGGCTACACCTTTACCTCCTACGTCATCCAA
TGGGTGAAGCAGAAGCCCGGTCAAGGTCTCGAGTGGATCGGCAGCATCAAT
CCCTACAACGATTACACCAAGTATAACGAAAAGTTTAAGGGCAAGGCCACT
CTGACAAGCGACAAGAGCTCCATTACCGCCTACATGGAGTTTTCCTCTTTA
ACTTCTGAGGACTCCGCTTTATACTATTGCGCTCGTTGGGGCGATGGCAAT
TATTGGGGCCGGGGAACTACTTTAACAGTGAGCTCC
(Linker)
GGCGGCGGCGGAAGCGGAGGTGGAGGATCTGGCGGTGGAGGCAGC
(αCD28 heavy chain variable region)
GACATCGAGATGACACAGTCCCCCGCTATCATGAGCGCCTCTTTAGGAGAA
CGTGTGACCATGACTTGTACAGCTTCCTCCAGCGTGAGCAGCTCCTATTTC
CACTGGTACCAGCAGAAACCCGGCTCCTCCCCTAAACTGTGTATCTACTCC
ACAAGCAATTTAGCTAGCGGCGTGCCTCCTCGTTTTAGCGGCTCCGGCAGC
ACCTCTTACTCTTTAACCATTAGCTCTATGGAGGCCGAAGATGCCGCCACA
TACTTTTGCCATCAGTACCACCGGTCCCCTACCTTTGGCGGAGGCACAAAG
CTGGAGACCAAGCGG
(Human tissue factor 219 form)
AGCGGCACCACCAACACAGTGGCCGCCTACAATCTGACTTGGAAATCCACC
AACTTCAAGACCATCCTCGAGTGGGAGCCCAAGCCCGTTAATCAAGTTTAT
ACCGTGCAGATTTCCACCAAGAGCGGCGACTGGAAATCCAAGTGCTTCTAT
ACCACAGACACCGAGTGCGATCTCACCGACGAGATCGTCAAAGACGTGAAG
CAGACATATTTAGCTAGGGTGTTCTCCTACCCCGCTGGAAACGTGGAGAGC
ACCGGATCCGCTGGAGAGCCTTTATACGAGAACTCCCCCGAATTCACCCCC
TATCTGGAAACCAATTTAGGCCAGCCCACCATCCAGAGCTTCGAACAAGTT
GGCACAAAGGTGAACGTCACCGTCGAAGATGAGAGGACTTTAGTGCGGAGG
AACAATACATTTTTATCCTTACGTGACGTCTTCGGCAAGGATTTAATCTAC
ACACTGTATTACTGGAAGTCTAGCTCCTCCGGCAAGAAGACCGCCAAGACC
AATACCAACGAATTTTTAATTGACGTGGACAAGGGCGAGAACTACTGCTTC
TCCGTGCAAGCTGTGATCCCCTCCCGGACAGTGAACCGGAAGTCCACCGAC
TCCCCCGTGGAGTGCATGGGCCAAGAGAAGGGAGAGTTTCGTGAG
(αCD3 light chain variable region)
CAGATCGTGCTGACCCAGTCCCCCGCTATTATGAGCGCTAGCCCCGGTGAA
AAGGTGACTATGACATGCAGCGCCAGCTCTTCCGTGAGCTACATGAACTGG
TATCAGCAGAAGTCCGGCACCAGCCCTAAAAGGTGGATCTACGACACCAGC
AAGCTGGCCAGCGGCGTCCCCGCTCACTTTCGGGGCTCCGGCTCCGGAACA
AGCTACTCTCTGACCATCAGCGGCATGGAAGCCGAGGATGCCGCTACCTAT
TACTGTCAGCAGTGGAGCTCCAACCCCTTCACCTTTGGATCCGGCACCAAG
CTCGAGATTAATCGT
(Linker)
GGAGGCGGAGGTAGCGGAGGAGGCGGATCCGGCGGTGGAGGTAGC
(αCD3 heavy chain variable region)
CAAGTTCAGCTCCAGCAAAGCGGCGCCGAACTCGCTCGGCCCGGCGCTTCC
GTGAAGATGTCTTGTAAGGCCTCCGGCTATACCTTCACCCGGTACACAATG
CACTGGGTCAAGCAACGGCCCGGTCAAGGTTTAGAGTGGATTGGCTATATC
AACCCCTCCCGGGGCTATACCAACTACAACCAGAAGTTCAAGGACAAAGCC
ACCCTCACCACCGACAAGTCCAGCAGCACCGCTTACATGCAGCTGAGCTCT
TTAACATCCGAGGATTCCGCCGTGTACTACTGCGCTCGGTACTACGACGAT
CATTACTGCCTCGATTACTGGGGCCAAGGTACCACCTTAACAGTCTCCTCC

### Exemplary Single-Chain Chimeric Polypeptide (αCD28scFv/TF/αCD3scFv) (SEQ ID NO: 327)

(Signal peptide)
MKWVTFISLLFLFSSAYS
(αCD28 light chain variable region)
VQLQQSGPELVKPGASVKMSCKASGYTFTSYVIQWVKQKPGQGLEWIGSIN
PYNDYTKYNEKFKGKATLTSDKSSITAYMEFSSLTSEDSALYYCARWGDGN
YWGRGTTLTVSS
(Linker)
GGGGSGGGGSGGGGS
(αCD28 heavy chain variable region)
DIEMTQSPAIMSASLGERVTMTCTASSSVSSSYFHWYQQKPGSSPKLCIYS
TSNLASGVPPRFSGSGSTSYSLTISSMEAEDAATYFCHQYHRSPTFGGGTK
LETKR
(Human tissue factor 219)
SGTTNTVAAYNLTWKSTNFKTILEWEPKPVNQVYTVQISTKSGDWKSKCFY
TTDTECDLTDEIVKDVKQTYLARVFSYPAGNVESTGSAGEPLYENSPEFTP
YLETNLGQPTIQSFEQVGTKVNVTVEDERTLVRRNNTFLSLRDVFGKDLIY
TLYYWKSSSSGKKTAKTNTNEFLIDVDKGENYCFSVQAVIPSRTVNRKSTD
SPVECMGQEKGEFRE
(αCD3 light chain variable region)
QIVLTQSPAIIVISASPGEKVTMTCSASSSVSYMNWYQQKSGTSPKRWIYD
TSKLASGVPAHFRGSGSGTSYSLTISGMEAEDAATYYCQQWSSNPFTFGSG
TKLEINR
(Linker)
GGGGSGGGGSGGGGS
(αCD3 heavy chain variable region)
[sequence omitted]

[1151] The nucleic acid encoding αCD3scFv/TF/αCD28scFv was cloned into a modified retrovirus expression vectors as described previously (Hughes et al., Hum Gene Ther 16:457-72, 2005). The expression vector encoding αCD3scFv/TF/αCD28scFv was transfected into CHO-K1 cells. Expression of the expression vector in CHO-K1 cells allowed for secretion of the soluble αCD3scFv/TF/αCD28scFv single-chain chimeric polypeptide (referred to as 3t28), which can be purified by anti-TF Ab affinity and other chromatography methods.

[1152] An anti-tissue factor affinity column was used to purify the αCD3scFv/TF/αCD28scFv single-chain chimeric polypeptide. The anti-tissue factor affinity column was connected to a GE Healthcare AKTA Avant system. A flow rate of 4 mL/min was used for all steps except the elution step, which was 2 mL/min.

[1153] Cell culture harvest including αCD3scFv/TF/αCD28scFv single-chain chimeric polypeptide was adjusted to pH 7.4 with 1M Tris base and loaded onto the anti-TF antibody affinity column (described above) which was equilibrated with 5 column volumes of PBS. After sample loading, the column was washed with 5 column volumes PBS, followed by elution with 6 column volumes 0.1 M acetic acid, pH 2.9. An A280 elution peak was collected and then neutralized to pH 7.5-8.0 by adding 1 M Tris base. The neutralized sample was then buffer exchanged into PBS using Amicon centrifugal filters with a 30 kDa molecular weight cutoff. The data in FIG. 58 show that the anti-tissue factor affinity column can bind the αCD3scFv/TF/αCD28scFv single-chain chimeric polypeptide, which contains a human soluble tissue factor domain. The buffer-exchanged protein sample was stored at 2-8° C. for further biochemical analysis and biological activity testing.

[1154] After each elution, the anti-tissue factor affinity column was stripped using 6 column volumes of 0.1 M glycine, pH 2.5. The column was then neutralized using 10 column volumes of PBS, 0.05% NaN₃, and stored at 2-8° C.

[1155] Analytical size exclusion chromatography (SEC) was performed on the αCD3scFv/TF/αCD28scFv single-chain chimeric polypeptide using a Superdex 200 Increase 10/300 GL gel filtration column (from GE Healthcare) connected to an AKTA

[1156] Avant system (from GE Healthcare). The column was equilibrated with 2 column volumes of PBS. A flow rate of 0.8 mL/min was used. Two hundred μL of αCD3scFv/TF/αCD28scFv single-chain chimeric polypeptide (1 mg/mL) was injected onto the column using a capillary loop. After injection of the single-chain chimeric polypeptide, 1.25 column volumes of PBS were flowed into the column. The SEC chromatograph is shown in FIG. 59. The data show that there are 3 protein peaks, likely representing a monomer and dimer or other different forms of the αCD3scFv/TF/αCD28scFv single-chain chimeric polypeptide.

[1157] To determine the purity and protein molecular weight of the αCD3scFv/TF/αCD28scFv single-chain chimeric polypeptide, the purified αCD3scFv/TF/αCD28scFv protein sample from anti-tissue factor affinity column was analyzed by standard sodium dodecyl sulfate polyacrylamide gel (4-12% NuPage Bis-Tris gel) electrophoresis (SDS-PAGE) method under reduced conditions. The gel was stained with InstantBlue for about 30 minutes and destained overnight with purified water. FIG. 60 shows the SDS gel of the αCD3scFv/TF/αCD28scFv single-chain chimeric polypeptide purified using an anti-tissue factor affinity column. The results show that the purified αCD3scFv/TF/αCD28scFv single-chain chimeric polypeptide has the expected molecular weight (72 kDa) in reduced SDS gel.

### Example 33. Functional Characterization of αCD3scFv/TF/αCD28scFv Single-Chain Chimeric Polypeptide

[1158] ELISA-based methods confirmed the formation of the αCD3scFv/TF/αCD28scFv single-chain chimeric polypeptide. The αCD3scFv/TF/αCD28scFv single-chain chimeric polypeptide was detected using an anti-TF antibody (I43)/anti-TF antibody-specific ELISA with a capture antibody, anti-human tissue factor antibody (143), and a detection antibody, anti-TF antibody (FIG. 61). A purified tissue factor protein with a similar concentration was used as a control.

[1159] A further in vitro experiment was performed to determine whether the αCD3scFv/TF/αCD28scFv single-chain chimeric polypeptide is capable of activating human peripheral blood mononuclear cells (PBMCs). Fresh human leukocytes were obtained from the blood bank and peripheral blood mononuclear cells (PBMC) were isolated using density gradient Histopaque (Sigma). The cells were counted and resuspended in 0.2×10⁶/mL in a 96-well flat bottom plate in 0.2 mL of complete media (RPMI 1640 (Gibco) supplemented with 2 mM L-glutamine (Thermo Life Technologies), penicillin (Thermo Life Technologies), streptomycin (Thermo Life Technologies), and 10% FBS (Hyclone)). The cells were stimulated with αCD3scFv/TF/αCD28scFv single-chain chimeric polypeptide from 0.01 nM to 1000 nM for 3 days at 37° C., 5% CO₂. After 72 hours, the cells were harvested and surface stained for CD4-488, CD8-PerCP Cy5.5, CD25-BV421, CD69-APCFire750, CD62L-PE Cy7, and CD44-PE specific antibodies (Biolegend) for 30 minutes. After surface staining, the cells were washed (1500 RPM for 5 minutes at room temperature) in FACS buffer (1×PBS (Hyclone) with 0.5% BSA (EMD Millipore) and 0.001% sodium azide (Sigma)). After two washes, the cells were resuspended in 300 μL of FACS buffer and analyzed by Flow Cytometry (Celesta-BD Bioscience). The data in FIGS. 62 and 63 show that the αCD3scFv/TF/αCD28scFv single-chain chimeric polypeptide is able to stimulate both CD8⁺ and CD4⁺ T-cells. A further experiment was performed, in which PBMCs isolated from blood using Histopaque (Sigma) were counted and resuspended in 0.2×10⁶/mL in a 96-well flat bottom plate in 0.2 mL of complete media (RPMI 1640 (Gibco) supplemented with 2 mM L-glutamine (Thermo Life Technologies), penicillin (Thermo Life Technologies), streptomycin (Thermo Life Technologies), and 10% FBS (Hyclone)). The cells were then stimulated with the αCD3scFv/TF/αCD28scFv single-chain chimeric polypeptide from 0.01 nM to 1000 nM for 3 days at 37° C., 5% CO₂. After 72 hours, the cells were harvested and surface stained for CD4-488, CD8-PerCP Cy5.5, CD25-BV421, CD69-APCFire750, CD62L-PE Cy7, and CD44-PE (Biolegend) for 30 minutes. After surface staining, the cells were washed (1500 RPM for 5 minutes at room temperature) in FACS buffer (1×PBS (Hyclone) with 0.5% BSA (EMD Millipore) and 0.001% sodium azide (Sigma)). After two washes, the cells were resuspended in 300 μL of FACS buffer and analyzed by Flow Cytometry (Celesta-BD Bioscience). The data again show that the αCD3scFv/TF/αCD28scFv single-chain chimeric polypeptide was able to stimulate activation of CD4⁺ T cells (FIG. 64).

### Example 34: Creation of an IL-7/IL-15RαSu DNA Construct

[1160] In a non-limiting example, an IL-7/IL-15RαSu DNA construct was created (see FIG. 65). The human IL-7 sequence, human IL-15RαSu sequence, human IL-15 sequence, and human tissue factor 219 sequence were obtained from the UniProt website and DNA for these sequences was synthesized by Genewiz. A DNA construct was made linking the IL-7 sequence to the IL-15RαSu sequence. The final IL-7/IL-15RαSu DNA construct sequence was synthesized by Genewiz.

[1161] The nucleic acid sequence encoding the second chimeric polypeptide of IL-7/IL-15RαSu construct (including signal peptide sequence) is as follows (SEQ ID NO: 206):

(Signal peptide)
ATGGGAGTGAAAGTTCTTTTTGCCCTTATTTGTATTGCTGTGGCCGAGGCC
(Human IL-7)
GATTGTGATATTGAAGGTAAAGATGGCAAACAATATGAGAGTGTTCTAATG
GTCAGCATCGATCAATTATTGGACAGCATGAAAGAAATTGGTAGCAATTGC
CTGAATAATGAATTTAACTTTTTTAAAAGACATATCTGTGATGCTAATAAG
GAAGGTATGTTTTTATTCCGTGCTGCTCGCAAGTTGAGGCAATTTCTTAAA
ATGAATAGCACTGGTGATTTTGATCTCCACTTATTAAAAGTTTCAGAAGGC
ACAACAATACTGTTGAACTGCACTGGCCAGGTTAAAGGAAGAAAACCAGCT
GCCCTGGGTGAAGCCCAACCAACAAAGAGTTTGGAAGAAAATAAATCTTTA
AAGGAACAGAAAAAACTGAATGACTTGTGTTTCCTAAAGAGACTATTACAA
GAGATAAAAACTTGTTGGAATAAAATTTTGATGGGCACTAAAGAACAC
(Human IL-15R α sushi domain)
ATCACGTGCCCTCCCCCCATGTCCGTGGAACACGCAGACATCTGGGTCAAG
AGCTACAGCTTGTACTCCAGGGAGCGGTACATTTGTAACTCTGGTTTCAAG
CGTAAAGCCGGCACGTCCAGCCTGACGGAGTGCGTGTTGAACAAGGCCACG
AATGTCGCCCACTGGACAACCCCCAGTCTCAAATGCATTAGA

[1162] The second chimeric polypeptide of IL-7/IL-15RαSu construct (including signal peptide sequence) is as follows (SEQ ID NO: 205):

(Signal peptide)
MKWVTFISLLFLFSSAYS
(Human IL-7)
DCDIEGKDGKQYESVLMVSIDQLLDSMKEIGSNCLNNEFNFFKRHICDANK
EGMFLFRAARKLRQFLKMNSTGDFDLHLLKVSEGTTILLNCTGQVKGRKPA
ALGEAQPTKSLEENKSLKEQKKLNDLCFLKRLLQEIKTCWNKILMGTKEH
(Human Tissue Factor 219)
SGTTNTVAAYNLTWKSTNFKTILEWEPKPVNQVYTVQISTKSGDWKSKCFY
TTDTECDLTDEIVKDVKQTYLARVFSYPAGNVESTGSAGEPLYENSPEFTP
YLETNLGQPTIQSFEQVGTKVNVTVEDERTLVRRNNTFLSLRDVFGKDLIY
TLYYWKSSSSGKKTAKTNTNEFLIDVDKGENYCFSVQAVIPSRTVNRKSTD
SPVECMGQEKGEFRE
(Human IL-15)
NWVNVISDLKKIEDLIQSMHIDATLYTESDVHPSCKVTAMKCFLLELQVIS
LESGDASIHDTVENLIILANNSLSSNGNVTESGCKECEELEEKNIKEFLQS
FVHIVQMFINTS

### Example 35: Creation of an IL-21/TF/IL-15 DNA Construct

[1163] In a non-limiting example, an IL-21/TF/IL-15 construct was made (FIG. 66) by linking the IL-21 sequence to the N-terminus coding region of tissue factor 219, and further linking the IL-21/TF construct with the N-terminus coding region of IL-15.

[1164] The nucleic acid sequence encoding the first chimeric polypeptide of IL-21/TF/IL-15 construct (including leader sequence), synthesized by Genewiz, is as follows (SEQ ID NO: 202):

(Signal peptide)
ATGGGAGTGAAAGTTCTTTTTGCCCTTATTTGTATTGCTGTGGCCGAGGCC
(Human IL-21 fragment)
CAAGGTCAAGATCGCCACATGATTAGAATGCGTCAACTTATAGATATTGTT
GATCAGCTGAAAAATTATGTGAATGACTTGGTCCCTGAATTTCTGCCAGCT
CCAGAAGATGTAGAGACAAACTGTGAGTGGTCAGCTTTTTCCTGTTTTCAG
AAGGCCCAACTAAAGTCAGCAAATACAGGAAACAATGAAAGGATAATCAAT
GTATCAATTAAAAAGCTGAAGAGGAAACCACCTTCCACAAATGCAGGGAGA
AGACAGAAACACAGACTAACATGCCCTTCATGTGATTCTTATGAGAAAAAA
CCACCCAAAGAATTCCTAGAAAGATTCAAATCACTTCTCCAAAAGATGATT
CATCAGCATCTGTCCTCTAGAACACACGGAAGTGAAGATTCC
(Human Tissue Factor 219)
TCAGGCACTACAAATACTGTGGCAGCATATAATTTAACTTGGAAATCAACT
AATTTCAAGACAATTTTGGAGTGGGAACCCAAACCCGTCAATCAAGTCTAC
ACTGTTCAAATAAGCACTAAGTCAGGAGATTGGAAAAGCAAATGCTTTTAC
ACAACAGACACAGAGTGTGACCTCACCGACGAGATTGTGAAGGATGTGAAG
CAGACGTACTTGGCACGGGTCTTCTCCTACCCGGCAGGGAATGTGGAGAGC
ACCGGTTCTGCTGGGGAGCCTCTGTATGAGAACTCCCCAGAGTTCACACCT
TACCTGGAGACAAACCTCGGACAGCCAACAATTCAGAGTTTTGAACAGGTG
GGAACAAAAGTGAATGTGACCGTAGAAGATGAACGGACTTTAGTCAGAAGG
AACAACACTTTCCTAAGCCTCCGGGATGTTTTTGGCAAGGACTTAATTTAT
ACACTTTATTATTGGAAATCTTCAAGTTCAGGAAAGAAAACAGCCAAAACA
AACACTAATGAGTTTTTGATTGATGTGGATAAAGGAGAAAACTACTGTTTC
AGTGTTCAAGCAGTGATTCCCTCCCGAACAGTTAACCGGAAGAGTACAGAC
AGCCCGGTAGAGTGTATGGGCCAGGAGAAAGGGGAATTCAGAGAA
(Human IL-15)
AACTGGGTGAACGTCATCAGCGATTTAAAGAAGATCGAAGATTTAATTCAG
TCCATGCATATCGACGCCACTTTATACACAGAATCCGACGTGCACCCCTCT
TGTAAGGTGACCGCCATGAAATGTTTTTTACTGGAGCTGCAAGTTATCTCT
TTAGAGAGCGGAGACGCTAGCATCCACGACACCGTGGAGAATTTAATCATT
TTAGCCAATAACTCTTTATCCAGCAACGGCAACGTGACAGAGTCCGGCTGC
AAGGAGTGCGAAGAGCTGGAGGAGAAGAACATCAAGGAGTTTCTGCAATCC
TTTGTGCACATTGTCCAGATGTTCATCAATACCTCC

[1165] The first chimeric polypeptide of IL-21/TF/IL-15 construct including leader sequence is SEQ ID NO: 201:

(Signal peptide)
(SEQ ID NO: 328)
MGVKVLFALICIAVAEA
(Human IL-21)
[sequence omitted]
(Human Tissue Factor 219)
SGTTNTVAAYNLTWKSTNFKTILEWEPKPVNQVYTVQISTKSGDWKSKCFY
TTDTECDLTDEIVKDVKQTYLARVFSYPAGNVESTGSAGEPLYENSPEFTP
YLETNLGQPTIQSFEQVGTKVNVTVEDERTLVRRNNTFLSLRDVFGKDLIY
TLYYWKSSSSGKKTAKTNTNEFLIDVDKGENYCFSVQAVIPSRTVNRKSTD
SPVECMGQEKGEFRE
(Human IL-15)
NWVNVISDLKKIEDLIQSMHIDATLYTESDVHPSCKVTAMKCFLLELQVIS
LESGDASIHDTVENLIILANNSLSSNGNVTESGCKECEELEEKNIKEFLQS
FVHIVQMFINTS

### Example 36: Secretion of IL-7/IL-15RαSu and IL-21/TF/IL-15 Fusion Proteins

[1166] The IL-7/IL-15RαSu and IL-21/TF/IL-15 DNA constructs were cloned into a pMSGV-1 modified retrovirus expression vector (as described by Hughes, Hum Gene Ther 16:457-72, 2005, hereby incorporated by reference), and the expression vector was transfected into CHO-K1 cells. Co-expression of the two constructs in CHO-K1 cells allowed for formation and secretion of a soluble IL-21/TF/IL-15:IL-7/IL-15RαSu protein complex (referred to as 21t15-7s; FIG. 67 and FIG. 68). The 21t15-7s protein was purified from CHO-K1 cell culture supernatant using anti-TF antibody affinity chromatography and size exclusion chromatography resulting in soluble (non-aggregated) protein complexes consisting of IL-7/IL-15RαSu and IL-21/TF/IL-15 fusion proteins.

[1167] In some cases, the leader (signal sequence) peptide is cleaved from the intact polypeptide to generate the mature form that may be soluble or secreted.

### Example 37: Purification of 21t15-7s by Immunoaffinity Chromatography

[1168] An anti-TF antibody affinity column was connected to a GE Healthcare™ AKTA Avant protein purification system. The flow rate was 4 mL/min for all steps except the elution step, which was 2 mL/min.

[1169] Cell culture harvest of 21t15-7s was adjusted to pH 7.4 with 1M Tris base and loaded onto the anti-TF antibody affinity column equilibrated with 5 column volumes of PBS. After loading the sample, the column was washed with 5 column volumes PBS, followed by elution with 6 column volumes 0.1M acetic acid, pH 2.9. Absorbance at 280 nm was collected and then the sample was neutralized to pH 7.5-8.0 by adding 1M Tris base. The neutralized sample was then buffer exchanged into PBS using Amicon® centrifugal filters with a 30 KDa molecular weight cutoff. The buffer-exchanged protein sample was stored at 2-8° C. for further biochemical analysis and biological activity testing.

[1170] After each elution, the anti-TF antibody affinity column was then stripped using 6 column volumes 0.1M glycine, pH 2.5. The column was then neutralized using 10 column volumes PBS, 0.05% sodium azide and stored at 2-8° C.

### Example 38: Size Exclusion Chromatography

[1171] A GE Healthcare Superdex® 200 Increase 10/300 GL gel filtration column was connected to a GE Healthcare AKTA™ Avant protein purification system. The column was equilibrated with 2 column volumes of PBS. The flow rate was 0.7 mL/min. A capillary loop was used to inject 2004, of 1 mg/mL of 7t15-21s complex onto the column. The injection was chased with 1.25 column volumes of PBS.

### Example 39: SDS-PAGE of 21t15-7s and 21t15-TGFRs

[1172] To determine the purity and protein molecular weight, the purified 21t15-7s or 21t15-TGFRs protein sample were analyzed using 4-12% NuPage Bis-Tris protein gel SDS-PAGE. The gel will be stained with InstantBlue™ for about 30 min, followed by destaining overnight in purified water.

### Example 40: Glycosylation of 21t15-7s and 21t15-TGFRs in CHO-K1 Cells

[1173] Glycosylation of 21t15-7s in CHO-K1 cells or 21t15-TGFRs in CHO-K1 cells were confirmed using the Protein Deglycosylation Mix II kit (New England Biolabs), according to the manufacturer's instructions.

### Example 41: Recombinant Protein Quantitation of 21t15-7s and 21t15-TGFRs Complexes

[1174] The 21t15-7s complex or the 21t15-TGFRs complex were detected and quantified using standard sandwich ELISA methods. Anti-human tissue factor antibody (IgG1) served as the capture antibody and biotinylated anti-human IL-21, IL-15, or IL-7 antibody (21t15-7s) or biotinylated anti-human IL-21, IL-15, or TGF-βRII antibody (21t15-TGFRs) served as the detection antibody. Tissue factor in purified 21t15-7s or 21t15-TGFRs protein complexes was detected using an anti-human tissue factor capture antibody, and anti-human tissue factor antibody (IgG1) detection antibody. The anti-TF antibody ELISA will be compared to purified tissue factor at similar concentrations.

### Example 42: Creation of an IL-21/IL-15RαSu DNA Construct

[1175] In a non-limiting example, an IL-21/IL-15RαSu DNA construct was created. The human IL-21 sequence and human IL-15RαSu sequence were obtained from the UniProt website and DNA for these sequences was synthesized by Genewiz. A DNA construct was made linking the IL-21 sequence to the IL-15RαSu sequence. The final IL-21/IL-15RαSu DNA construct sequence was synthesized by Genewiz. See FIG. 69.

### Example 43: Creation of an IL-7/TF/IL-15 DNA Construct

[1176] In a non-limiting example, an IL-7/TF/IL-15 construct was made by linking the IL-7 sequence to the N-terminus coding region of tissue factor 219, and further linking the IL-7/TF construct with the N-terminus coding region of IL-15. See FIG. 70.

### Example 44: Creation of an IL-21/IL-15Rα Sushi DNA Construct

[1177] In a non-limiting example, a second chimeric polypeptide of IL-21/IL-15RαSu was generated. The human IL-21 and human IL-15Rα sushi sequences were obtained from the UniProt website and DNA for these sequences was synthesized by Genewiz. A DNA construct was made linking the IL-21 sequence to the IL-15Rα sushi sequence. The final IL-21/IL-15RαSu DNA construct sequence was synthesized by Genewiz.

[1178] The nucleic acid sequence encoding the second chimeric polypeptide of IL-21/IL-15RαSu domain (including leader sequence), synthesized by Genewiz, is as follows (SEQ ID NO: 214):

(Signal peptide)
ATGAAGTGGGTGACCTTCATCAGCCTGCTGTTCCTGTTCTCCAGCGCCTAC
TCC
(Human IL-21)
CAGGGCCAGGACAGGCACATGATCCGGATGAGGCAGCTCATCGACATCGTC
GACCAGCTGAAGAACTACGTGAACGACCTGGTGCCCGAGTTTCTGCCTGCC
CCCGAGGACGTGGAGACCAACTGCGAGTGGTCCGCCTTCTCCTGCTTTCAG
AAGGCCCAGCTGAAGTCCGCCAACACCGGCAACAACGAGCGGATCATCAAC
GTGAGCATCAAGAAGCTGAAGCGGAAGCCTCCCTCCACAAACGCCGGCAGG
AGGCAGAAGCACAGGCTGACCTGCCCCAGCTGTGACTCCTACGAGAAGAAG
CCCCCCAAGGAGTTCCTGGAGAGGTTCAAGTCCCTGCTGCAGAAGATGATC
CATCAGCACCTGTCCTCCAGGACCCACGGCTCCGAGGACTCC
(Human IL-15R α sushi domain)
ATTACATGCCCCCCTCCCATGAGCGTGGAGCACGCCGACATCTGGGTGAAG
AGCTATAGCCTCTACAGCCGGGAGAGGTATATCTGTAACAGCGGCTTCAAG
AGGAAGGCCGGCACCAGCAGCCTCACCGAGTGCGTGCTGAATAAGGCTACC
AACGTGGCTCACTGGACAACACCCTCTTTAAAGTGCATCCGG

[1179] The second chimeric polypeptide of IL-21/IL-15Rα sushi domain (including leader sequence) is as follows (SEQ ID NO: 213):

(Signal Sequence)
MKWVTFISLLFLFSSAYS
(Human IL-21)
[sequence omitted]
(Human IL-15Ra sushi domain)
ITCPPPMSVEHADIWVKSYSLYSRERYICNSGFKRKAGTSSLTECVLNKAT
NVAHWTTPSLKCIR

### Example 45: Creation of an IL-7/TF/IL-15 DNA Construct

[1180] In a non-limiting example, an exemplary first chimeric polypeptide of IL-7/TF/IL-15 was made by linking the IL-7 sequence to the N-terminus coding region of tissue factor 219, and further linking the IL-7/TF construct with the N-terminus coding region of IL-15. The nucleic acid sequence encoding the first chimeric polypeptide of IL-7/TF/IL-15 (including leader sequence), synthesized by Genewiz, is as follows (SEQ ID NO: 210):

(Signal peptide)
ATGAAGTGGGTGACCTTCATCAGCCTGCTGTTCCTGTTCTCCAGCGCCTAC
TCC
(Human IL-7 fragment)
GATTGCGACATCGAGGGCAAGGACGGCAAGCAGTACGAGAGCGTGCTGATG
GTGTCCATCGACCAGCTGCTGGACAGCATGAAGGAGATCGGCTCCAACTGC
CTCAACAACGAGTTCAACTTCTTCAAGCGGCACATCTGCGACGCCAACAAG
GAGGGCATGTTCCTGTTCAGGGCCGCCAGGAAACTGCGGCAGTTCCTGAAG
ATGAACTCCACCGGCGACTTCGACCTGCACCTGCTGAAGGTGTCCGAGGGC
ACCACCATCCTGCTGAACTGCACCGGACAGGTGAAGGGCCGGAAACCTGCT
GCTCTGGGAGAGGCCCAACCCACCAAGAGCCTGGAGGAGAACAAGTCCCTG
AAGGAGCAGAAGAAGCTGAACGACCTGTGCTTCCTGAAGAGGCTGCTGCAG
GAGATCAAGACCTGCTGGAACAAGATCCTGATGGGCACCAAGGAGCAT
(Human Tissue Factor 219)
AGCGGCACAACCAACACAGTCGCTGCCTATAACCTCACTTGGAAGAGCACC
AACTTCAAAACCATCCTCGAATGGGAACCCAAACCCGTTAACCAAGTTTAC
ACCGTGCAGATCAGCACCAAGTCCGGCGACTGGAAGTCCAAATGTTTCTAT
ACCACCGACACCGAGTGCGATCTCACCGATGAGATCGTGAAAGATGTGAAA
CAGACCTACCTCGCCCGGGTGTTTAGCTACCCCGCCGGCAATGTGGAGAGC
ACTGGTTCCGCTGGCGAGCCTTTATACGAGAACAGCCCCGAATTTACCCCT
TACCTCGAGACCAATTTAGGACAGCCCACCATCCAAAGCTTTGAGCAAGTT
GGCACAAAGGTGAATGTGACAGTGGAGGACGAGCGGACTTTAGTGCGGCGG
AACAACACCTTTCTCAGCCTCCGGGATGTGTTCGGCAAAGATTTAATCTAC
ACACTGTATTACTGGAAGTCCTCTTCCTCCGGCAAGAAGACAGCTAAAACC
AACACAAACGAGTTTTTAATCGACGTGGATAAAGGCGAAAACTACTGTTTC
AGCGTGCAAGCTGTGATCCCCTCCCGGACCGTGAATAGGAAAAGCACCGAT
AGCCCCGTTGAGTGCATGGGCCAAGAAAAGGGCGAGTTCCGGGAG
(Human IL-15)
AACTGGGTGAACGTCATCAGCGATTTAAAGAAGATCGAAGATTTAATTCAG
TCCATGCATATCGACGCCACTTTATACACAGAATCCGACGTGCACCCCTCT
TGTAAGGTGACCGCCATGAAATGTTTTTTACTGGAGCTGCAAGTTATCTCT
TTAGAGAGCGGAGACGCTAGCATCCACGACACCGTGGAGAATTTAATCATT
TTAGCCAATAACTCTTTATCCAGCAACGGCAACGTGACAGAGTCCGGCTGC
AAGGAGTGCGAAGAGCTGGAGGAGAAGAACATCAAGGAGTTTCTGCAATCC
TTTGTGCACATTGTCCAGATGTTCATCAATACCTCC

[1181] The first chimeric polypeptide of IL-7/TF/IL-15 (including leader sequence), is as follows (SEQ ID NO: 209):

(Signal peptide)
MKWVTFISLLFLFSSAYS
(Human IL-7)
DCDIEGKDGKQYESVLMVSIDQLLDSMKEIGSNCLNNEFNFFKRHICDANK
EGMFLFRAARKLRQFLKMNSTGDFDLHLLKVSEGTTILLNCTGQVKGRKPA
ALGEAQPTKSLEENKSLKEQKKLNDLCFLKRLLQEIKTCWNKILMGTKEH
(Human Tissue Factor 219)
SGTTNTVAAYNLTWKSTNFKTILEWEPKPVNQVYTVQISTKSGDWKSKCFY
TTDTECDLTDEIVKDVKQTYLARVFSYPAGNVESTGSAGEPLYENSPEFTP
YLETNLGQPTIQSFEQVGTKVNVTVEDERTLVRRNNTFLSLRDVFGKDLIY
TLYYWKSSSSGKKTAKTNTNEFLIDVDKGENYCFSVQAVIPSRTVNRKSTD
SPVECMGQEKGEFRE
(Human IL-15)
NWVNVISDLKKIEDLIQSMHIDATLYTESDVHPSCKVTAMKCFLLELQVIS
LESGDASIHDTVENLIILANNSLSSNGNVTESGCKECEELEEKNIKEFLQS
FVHIVQMFINTS

### Example 46: Secretion of IL-21/IL-15RαSu and IL-7/TF/IL-15 Fusion Proteins

[1182] The IL-21/IL-15RαSu and IL-7/TF/IL-15 DNA constructs were cloned into a pMSGV-1 modified retrovirus expression vector (as described by Hughes, Hum Gene Ther 16:457-72, 2005, hereby incorporated by reference), and the expression vector was transfected into CHO-K1 cells. Co-expression of the two constructs in CHO-K1 cells allowed for formation and secretion of a soluble IL-7/TF/IL-15:IL-21/IL-15RαSu protein complex (referred to as 7t15-21s). The 7t15-21s protein was purified from CHO-K1 cell culture supernatant using anti-TF antibody (IgG1) affinity chromatography and size exclusion chromatography resulting in soluble (non-aggregated) protein complexes consisting of IL-21/IL-15RαSu and IL-7/TF/IL-15 fusion proteins. See FIG. 71 and FIG. 72.

### Example 47: Expansion Capacity of Primary Natural Killer (NK) Cells by 7t15-21s Complex+Anti-TF IgG1 Antibody

[1183] To assess the 7t15-21s complex's ability to expand primary natural killer (NK) cells, 7t15-21s complex and 7t15-21s complex+anti-TF IgG1 antibody are added to NK cells obtained from samples of fresh human leukocytes. Cells are stimulated with 50 nM of 7t15-21s complex with or without 25 nM of anti-TF IgG1 or anti-TF IgG4 antibody at 37° and 5% CO₂. Cells are maintained at concentration at 0.5×10⁶/mL not exceeding 2.0×10⁶/mL by counting every 48-72 hours and media is replenished with fresh stimulator. Cells stimulated with 7t15-21s complex or anti-TF IgG1 antibody or anti-TFIgG4 antibody or anti-TF IgG4+7t15-21s complex are maintained up to day 5. Expansion of primary NK cells upon incubation with 21t15-7s complex+anti-TF IgG1 antibody is observed.

### Example 48: Activation of Expanded NK Cells by the 7t15-21s Complex+Anti-TF IgG1 Antibody

[1184] Primary NK cells are induced ex vivo following overnight stimulation of purified NK cells with 7t15-21s complex+anti-TF IgG1 antibody. Fresh human leukocytes are obtained from a blood bank and CD56+NK cells are isolated with the RosetteSep/human NK cell reagent (StemCell Technologies). The purity of NK cells is >80% and is confirmed by staining with CD56-BV421 and CD16-BV510 specific antibodies (BioLegend). Cells are counted and resuspended in 1×10⁶/mL in a 24 well flat bottom plate in 1 mL of complete media (RPMI 1640 (Gibco), supplemented with 4 mM L-glutamine (Thermo Life Technologies), penicillin (Thermo Life Technologies), streptomycin (Thermo Life Technologies), non-essential amino acid (Thermo Life Technologies), sodium pyruvate (Thermo Life Technologies), and 10% FBS (Hyclone)). Cells are stimulated with 50 nM of 7t15-21s with or without 25 nM of anti-TF IgG1 antibody at 37° and 5% CO₂. Cells are counted every 48-72 hours and maintained at a concentration of 0.5×10⁶/mL to 2.0×10⁶/mL until day 14. Media is periodically replenished with fresh stimulator. Cells are harvested and surface stained at day 3 for CD56-BV421, CD16-BV510, CD25-PE, CD69-APCFire750 specific antibodies (Biolegend and analyzed by Flow Cytometry-Celeste-BD Bioscience). The activation marker CD25 MFI are observed to increase with 7t15-21s complex+anti-TF IgG1 antibody stimulation, but not 7t15-21s complex stimulation. The activation marker CD69 MFI is observed to increase with both 7t15-21s complex+anti-TF IgG1 antibody and with 7t15-21s complex, alone.

### Example 49: Increase in Glucose Metabolism in NK Cells Using 18t15-12s

[1185] A set of experiments was performed to determine the effect of the construct of 18t15-12s on oxygen consumption rate and extracellular acidification rate (ECAR) on NK cells purified from human blood.

[1186] In these experiments, fresh human leukocytes were obtained from the blood bank from two different human donors and NK cells were isolated via negative selection using the RosetteSep/human NK cell reagent (StemCell Technologies). The purity of NK cells was >80% and confirmed by staining with CD56-BV421 and CD16-BV510 specific antibodies (BioLegend). The cells were counted and resuspended in 2×10⁶/mL in 24-well, flat-bottom plates in 1 mL of complete media (RPMI 1640 (Gibco) supplemented with 4 mM L-glutamine (Thermo Life Technologies), penicillin (Thermo Life Technologies), streptomycin (Thermo Life Technologies), non-essential amino acid (Thermo Life Technologies), sodium pyruvate (Thermo Life Technologies) and 10% FBS (Hyclone)). The cells were stimulated with either (1) media alone, (2) 100 nM 18t15-12s, or (3) mixture of single cytokines recombinant human IL-12 (0.25 μg), recombinant human IL-15 (1.25 μg), and recombinant human IL-18 (1.25 μg) overnight at 37° C., 5% CO₂. On the next day, the cells were harvested and extracellular flux assays on expanded NK cells were performed using a XFp Analyzer (Seahorse Bioscience). The harvested cells washed and plated 2.0×10⁵ cells/well in at least duplicate for extracellular flux analysis of OCR (Oxygen Consumption Rate) and ECAR (Extracellular Acidification Rate). The glycolysis stress tests were performed in Seahorse Media contain 2 mM of glutamine. The following were used during the assay: 10 mM glucose; 100 nM oligomycin; and 100 mM 2-deoxy-D-glycose (2DG).

[1187] The data show that the 18t15-12s results in significantly increased oxygen consumption rate (FIG. 73) and extracellular acidification rate (ECAR) as compared to the same cells activated with a combination of recombinant human IL-12, recombinant human IL-15, and recombinant human IL-18 (FIG. 74).

### Example 50: 7t15-16s21 Fusion Protein Generation and Characterization

[1188] A fusion protein complex was generated comprising of anti-CD16scFv/IL-15RαSu/IL-21 and IL-7/TF/IL-15 fusion proteins. The human IL-7 and IL-21 sequences were obtained from the UniProt website and DNA for these sequences was synthesized by Genewiz. Specifically, a construct was made linking the IL-7 sequence to the N-terminus coding region of tissue factor 219 followed by the N-terminus coding region of IL-15.

[1189] The nucleic acid and protein sequences of a construct comprising IL-7 linked to the N-terminus of tissue factor 219 following with the N-terminus of IL-15 are shown below.

[1190] The nucleic acid sequence of the IL-7/TF/IL-15 construct (including signal peptide sequence) is as follows:

(Signal peptide)
ATGAAGTGGGTGACCTTCATCAGCCTGCTGTTCCTGTTCTCCAGCGCCTAC
TCC
(Human IL-7)
GATTGCGACATCGAGGGCAAGGACGGCAAGCAGTACGAGAGCGTGCTGATG
GTGTCCATCGACCAGCTGCTGGACAGCATGAAGGAGATCGGCTCCAACTGC
CTCAACAACGAGTTCAACTTCTTCAAGCGGCACATCTGCGACGCCAACAAG
GAGGGCATGTTCCTGTTCAGGGCCGCCAGGAAACTGCGGCAGTTCCTGAAG
ATGAACTCCACCGGCGACTTCGACCTGCACCTGCTGAAGGTGTCCGAGGGC
ACCACCATCCTGCTGAACTGCACCGGACAGGTGAAGGGCCGGAAACCTGCT
GCTCTGGGAGAGGCCCAACCCACCAAGAGCCTGGAGGAGAACAAGTCCCTG
AAGGAGCAGAAGAAGCTGAACGACCTGTGCTTCCTGAAGAGGCTGCTGCAG
GAGATCAAGACCTGCTGGAACAAGATCCTGATGGGCACCAAGGAGCAT
(Human Tissue Factor 219)
AGCGGCACAACCAACACAGTCGCTGCCTATAACCTCACTTGGAAGAGCACC
AACTTCAAAACCATCCTCGAATGGGAACCCAAACCCGTTAACCAAGTTTAC
ACCGTGCAGATCAGCACCAAGTCCGGCGACTGGAAGTCCAAATGTTTCTAT
ACCACCGACACCGAGTGCGATCTCACCGATGAGATCGTGAAAGATGTGAAA
CAGACCTACCTCGCCCGGGTGTTTAGCTACCCCGCCGGCAATGTGGAGAGC
ACTGGTTCCGCTGGCGAGCCTTTATACGAGAACAGCCCCGAATTTACCCCT
TACCTCGAGACCAATTTAGGACAGCCCACCATCCAAAGCTTTGAGCAAGTT
GGCACAAAGGTGAATGTGACAGTGGAGGACGAGCGGACTTTAGTGCGGCGG
AACAACACCTTTCTCAGCCTCCGGGATGTGTTCGGCAAAGATTTAATCTAC
ACACTGTATTACTGGAAGTCCTCTTCCTCCGGCAAGAAGACAGCTAAAACC
AACACAAACGAGTTTTTAATCGACGTGGATAAAGGCGAAAACTACTGTTTC
AGCGTGCAAGCTGTGATCCCCTCCCGGACCGTGAATAGGAAAAGCACCGAT
AGCCCCGTTGAGTGCATGGGCCAAGAAAAGGGCGAGTTCCGGGAG
(Human IL-15)
AACTGGGTGAACGTCATCAGCGATTTAAAGAAGATCGAAGATTTAATTCAG
TCCATGCATATCGACGCCACTTTATACACAGAATCCGACGTGCACCCCTCT
TGTAAGGTGACCGCCATGAAATGTTTTTTACTGGAGCTGCAAGTTATCTCT
TTAGAGAGCGGAGACGCTAGCATCCACGACACCGTGGAGAATTTAATCATT
TTAGCCAATAACTCTTTATCCAGCAACGGCAACGTGACAGAGTCCGGCTGC
AAGGAGTGCGAAGAGCTGGAGGAGAAGAACATCAAGGAGTTTCTGCAATCC
TTTGTGCACATTGTCCAGATGTTCATCAATACCTCC

[1191] The amino acid sequence of IL-7/TF/IL-15 fusion protein (including the leader sequence) is as follows:

(Signal peptide)
MKWVTFISLLFLFSSAYS
(Human IL-7)
DCDIEGKDGKQYESVLMVSIDQLLDSMKEIGSNCLNNEFNFFKRHICDANK
EGMFLFRAARKLRQFLKMNSTGDFDLHLLKVSEGTTILLNCTGQVKGRKPA
ALGEAQPTKSLEENKSLKEQKKLNDLCFLKRLLQEIKTCWNKILMGTKEH
(Human Tissue Factor 219)
SGTTNTVAAYNLTWKSTNFKTILEWEPKPVNQVYTVQISTKSGDWKSKCFY
TTDTECDLTDEIVKDVKQTYLARVFSYPAGNVESTGSAGEPLYENSPEFTP
YLETNLGQPTIQSFEQVGTKVNVTVEDERTLVRRNNTFLSLRDVFGKDLIY
TLYYWKSSSSGKKTAKTNTNEFLIDVDKGENYCFSVQAVIPSRTVNRKSTD
SPVECMGQEKGEFRE
(Human IL-15)
NWVNVISDLKKIEDLIQSMHIDATLYTESDVHPSCKVTAMKCFLLELQVIS
LESGDASIHDTVENLIILANNSLSSNGNVTESGCKECEELEEKNIKEFLQS
FVHIVQMFINTS

[1192] Constructs were also made by linking the anti-CD16scFv sequence to the N-terminus coding region of IL-15RαSu chain followed by the N-terminus coding region of IL-21 which was synthesized by Genewiz. The nucleic acid and protein sequences of a construct comprising the anti-CD16scFv linked to the N-terminus of IL-15RαSu chain followed by the N-terminus coding region of IL-21 are shown below.

[1193] The nucleic acid sequence of the anti-CD16SscFv/IL-15 RαSu/IL-21 construct (including signal peptide sequence) is as follows:

(Signal peptide)
ATGAAGTGGGTGACCTTCATCAGCCTGCTGTTCCTGTTCTCCAGCGCCTAC
TCC
((Anti-human CD16scFv)
TCCGAGCTGACCCAGGACCCTGCTGTGTCCGTGGCTCTGGGCCAGACCGTG
AGGATCACCTGCCAGGGCGACTCCCTGAGGTCCTACTACGCCTCCTGGTAC
CAGCAGAAGCCCGGCCAGGCTCCTGTGCTGGTGATCTACGGCAAGAACAAC
AGGCCCTCCGGCATCCCTGACAGGTTCTCCGGATCCTCCTCCGGCAACACC
GCCTCCCTGACCATCACAGGCGCTCAGGCCGAGGACGAGGCTGACTACTAC
TGCAACTCCAGGGACTCCTCCGGCAACCATGTGGTGTTCGGCGGCGGCACC
AAGCTGACCGTGGGCCATGGCGGCGGCGGCTCCGGAGGCGGCGGCAGCGGC
GGAGGAGGATCCGAGGTGCAGCTGGTGGAGTCCGGAGGAGGAGTGGTGAGG
CCTGGAGGCTCCCTGAGGCTGAGCTGTGCTGCCTCCGGCTTCACCTTCGAC
GACTACGGCATGTCCTGGGTGAGGCAGGCTCCTGGAAAGGGCCTGGAGTGG
GTGTCCGGCATCAACTGGAACGGCGGATCCACCGGCTACGCCGATTCCGTG
AAGGGCAGGTTCACCATCAGCAGGGACAACGCCAAGAACTCCCTGTACCTG
CAGATGAACTCCCTGAGGGCCGAGGACACCGCCGTGTACTACTGCGCCAGG
GGCAGGTCCCTGCTGTTCGACTACTGGGGACAGGGCACCCTGGTGACCGTG
TCCAGG
(Human IL-15R α sushi domain)
ATTACATGCCCCCCTCCCATGAGCGTGGAGCACGCCGACATCTGGGTGAAG
AGCTATAGCCTCTACAGCCGGGAGAGGTATATCTGTAACAGCGGCTTCAAG
AGGAAGGCCGGCACCAGCAGCCTCACCGAGTGCGTGCTGAATAAGGCTACC
AACGTGGCTCACTGGACAACACCCTCTTTAAAGTGCATCCGG
(Human IL-21)
CAGGGCCAGGACAGGCACATGATCCGGATGAGGCAGCTCATCGACATCGTC
GACCAGCTGAAGAACTACGTGAACGACCTGGTGCCCGAGTTTCTGCCTGCC
CCCGAGGACGTGGAGACCAACTGCGAGTGGTCCGCCTTCTCCTGCTTTCAG
AAGGCCCAGCTGAAGTCCGCCAACACCGGCAACAACGAGCGGATCATCAAC
GTGAGCATCAAGAAGCTGAAGCGGAAGCCTCCCTCCACAAACGCCGGCAGG
AGGCAGAAGCACAGGCTGACCTGCCCCAGCTGTGACTCCTACGAGAAGAAG
CCCCCCAAGGAGTTCCTGGAGAGGTTCAAGTCCCTGCTGCAGAAGATGATC
CATCAGCACCTGTCCTCCAGGACCCACGGCTCCGAGGACTCC

[1194] The amino acid sequence of the anti-CD16scFv/IL-15RαSu/IL-21 construct (including signal peptide sequence) is as follows:

(Signal peptide)
MKWVTFISLLFLFSSAYS
(Anti-human CD16scFv)
SELTQDPAVSVALGQTVRITCQGDSLRSYYASWYQQKPGQAPVLVIYGKNN
RPSGIPDRFSGSSSGNTASLTITGAQAEDEADYYCNSRDSSGNHVVFGGGT
KLTVGHGGGGSGGGGSGGGGSEVQLVESGGGVVRPGGSLRLSCAASGFTFD
DYGMSWVRQAPGKGLEWVSGINWNGGSTGYADSVKGRFTISRDNAKNSLYL
QMNSLRAEDTAVYYCARGRSLLFDYWGQGTLVTVSR
(Human IL-15R α sushi domain)
ITCPPPMSVEHADIWVKSYSLYSRERYICNSGFKRKAGTSSLTECVLNKAT
NVAHWTTPSLKCIR
(Human IL-21)
[sequence omitted]

[1195] In some cases, the leader peptide is cleaved from the intact polypeptide to generate the mature form that may be soluble or secreted.

[1196] The anti-CD16scFv/IL-15RαSu/IL-21 and IL-7/TF/IL-15 constructs were cloned into a modified retrovirus expression vectors as described previously (Hughes M S, Yu Y Y, Dudley M E, Zheng Z, Robbins P F, Li Y, et al. Transfer of a TCR gene derived from a patient with a marked antitumor response conveys highly active T-cell effector functions. Hum Gene Ther 2005; 16:457-72), and the expression vectors were transfected into CHO-K1 cells. Co-expression of the two constructs in CHO-K1 cells allowed for formation and secretion of the soluble IL-7/TF/IL-15:anti-CD16scFv/IL-15RαSu/IL-21 protein complex (referred to as 7t15-16s21; FIG. 75 and FIG. 76), which can be purified by anti-TF IgG1 antibody-based affinity and other chromatography methods.

Binding of 7t15-16s21 to CHO Cells Expressing Human CD16b

[1197] CHO cells were transfected with human CD16b in a pMC plasmid and selected with 10 μg/mL of blasticidin for 10 days. The CHO cells stably expressing CD16b were stained with 1.2 μg/mL of 7t15-16s21, containing anti-human CD16 scFv or 18t15-12s, which does not contain anti-human CD16 scFv, as a negative control, and then stained with biotinylated anti-human tissue factor and PE conjugated streptavidin. Only anti-human CD16scFv containing 7t15-16s21 stained the cells as shown in FIG. 77A. 18t15-12s did not stain the CHO cells expressing human CD16b as showed in FIG. 77B.

Detection of IL-15, IL-21, and IL-7 in 7t15-16s21 Using ELISA

[1198] A 96-well plate was coated with 100 μL (8 μg/mL) of anti-TF IgG1 in R5 (coating buffer) and incubated at room temperature (RT) for 2 hrs. The plates were washed 3 times and blocked with 100 μL of 1% BSA in PBS. Serial dilution of 7t15-16s21 (at a 1:3 ratio) were added to the wells, and incubated at RT for 60 min. Following 3 washes, 50 ng/mL of biotinylated-anti-IL-15 antibody (BAM247, R&D Systems), 500 ng/mL of biotinylated-anti-IL-21 antibody (13-7218-81, R&D Systems), or 500 ng/mL of biotinylated-anti-IL-7 antibody (506602, R&D Systems) was added to the wells and incubated at RT for 60 min. The plate was washed 3 times, and incubated with 0.25 pg/mL of HRP-SA (Jackson ImmunoResearch) at 100 μL per well for 30 min at RT, followed by 4 washes and incubation with 1000 of ABTS for 2 mins at RT. Absorbance was read at 405 nm. As shown in FIGS. 78A-78C, the IL-15, IL-21, and IL-7 domains in 7t15-16s21 were detected by the individual antibodies.

The IL-15 in 7t15-16s21 Promotes IL-2R/3 and Common γ Chain Containing 32Dβ Cell Proliferation

[1199] To analyze the activity of IL-15 in 7t15-16s21, the IL-15 activity of 7t15-16s21 was compared to recombinant IL-15 using 32Dβ cells that express IL2Rβ and common γ chain, and evaluating their effects on promoting cell proliferation. IL-15 dependent 32Dβ cells were washed 5 times with IMDM-10% FBS and seeded in the wells at 2×10⁴ cells/well. Serially-diluted 7t15-16s21 or IL-15 were added to the cells (FIG. 79). Cells were incubated in a CO₂ incubator at 37° C. for 3 days. Cell proliferation was detected by adding 10₁1.1 of WST1 to each well on day 3 and incubating for an additional 3 hours in a CO₂ incubator at 37° C. The absorbance at 450 nm was measured by analyzing the amount of formazan dye produced. As shown in FIG. 79, 7t15-16s21 and IL-15 promoted 32Dβ cell proliferation, with the EC₅₀ of 7t15-16s21 and IL-15 being 172.2 pM and 16.63 pM, respectively.

Purification Elution Chromatograph of 7t15-16s21 from Anti-TF Antibody Affinity Column

[1200] 7t15-16s21 harvested from cell culture was loaded onto the anti-TF antibody affinity column equilibrated with 5 column volumes of PBS. The column was then washed with 5 column volumes of PBS, followed by elution with 6 column volumes of 0.1M acetic acid (pH 2.9). A280 elution peak was collected and neutralized to pH 7.5-8.0 with 1M Tris base. The neutralized sample was buffer exchanged into PBS using Amicon centrifugal filters with a 30 KDa molecular weight cutoff. FIG. 80 is a line graph showing the chromatographic profile of 7t15-16s21 protein containing cell culture supernatant following binding and elution on anti-TF antibody resin. As shown in FIG. 80, the anti-TF antibody affinity column bound 7t15-16s21 which contains TF. The buffer-exchanged protein sample was stored at 2-8° C. for further biochemical analyses and biological activity tests. After each elution, the anti-TF antibody affinity column was stripped using 6 column volumes of 0.1M glycine (pH 2.5). The column was then neutralized using 5 column volumes of PBS, and 7 column volumes of 20% ethanol for storage. The anti-TF antibody affinity column was connected to a GE Healthcare AKTA Avant system. The flow rate was 4 mL/min for all steps except for the elution step, which was 2 mL/min.

Analytical Size Exclusion Chromatography (SEC) Analysis of 7t15-16s21

[1201] To perform size exclusion chromatography (SEC) analysis for 7t15-16s21, a Superdex 200 Increase 10/300 GL gel filtration column (GE Healthcare) connected to an AKTA Avant system (GE Healthcare) was used. The column was equilibrated with 2 column volumes of PBS. The flow rate was 0.7 mL/min. A sample containing 7t15-16s21 in PBS was injected into the Superdex 200 column using a capillary loop, and analyzed by SEC. As shown in FIG. 81, the SEC results showed two protein peaks for 7t15-16s21.

### Example 51: TGFRt15-16s21 Fusion Protein Generation and Characterization

[1202] A fusion protein complex was generated comprising anti-human CD16scFv/IL-15RαSu/IL21 and TGFβ Receptor II/TF/IL-15 fusion proteins (FIGS. 82 and 83). The human TGFβ Receptor II (Ile24-Asp159), tissue factor 219, and IL-15 sequences were obtained from the UniProt website and DNA for these sequences was synthesized by Genewiz. Specifically, a construct was made linking two TGFβ Receptor II sequences with a G4S(3) linker to generate a single chain version of TGFβ Receptor II and then directly linking to the N-terminus coding region of tissue factor 219 followed by the N-terminus coding region of IL-15.

[1203] The nucleic acid and protein sequences of a construct comprising two TGFβ Receptor II linked to the N-terminus of tissue factor 219 following with the N-terminus of IL-15 are shown below.

[1204] The nucleic acid sequence of the two TGFβ Receptor II/TF/IL-15 construct (including signal peptide sequence) is as follows:

(Signal peptide)
ATGAAGTGGGTGACCTTCATCAGCCTGCTGTTCCTGTTCTCCAGCGCCTAC
TCC
(Two Human TGFβ Receptor II fragments)
ATCCCCCCCCATGTGCAAAAGAGCGTGAACAACGATATGATCGTGACCGAC
AACAACGGCGCCGTGAAGTTTCCCCAGCTCTGCAAGTTCTGCGATGTCAGG
TTCAGCACCTGCGATAATCAGAAGTCCTGCATGTCCAACTGCAGCATCACC
TCCATCTGCGAGAAGCCCCAAGAAGTGTGCGTGGCCGTGTGGCGGAAAAAT
GACGAGAACATCACCCTGGAGACCGTGTGTCACGACCCCAAGCTCCCTTAT
CACGACTTCATTCTGGAGGACGCTGCCTCCCCCAAATGCATCATGAAGGAG
AAGAAGAAGCCCGGAGAGACCTTCTTTATGTGTTCCTGTAGCAGCGACGAG
TGTAACGACAACATCATCTTCAGCGAAGAGTACAACACCAGCAACCCTGAT
GGAGGTGGCGGATCCGGAGGTGGAGGTTCTGGTGGAGGTGGGAGTATTCCT
CCCCACGTGCAGAAGAGCGTGAATAATGACATGATCGTGACCGATAACAAT
GGCGCCGTGAAATTTCCCCAGCTGTGCAAATTCTGCGATGTGAGGTTTTCC
ACCTGCGACAACCAGAAGTCCTGTATGAGCAACTGCTCCATCACCTCCATC
TGTGAGAAGCCTCAGGAGGTGTGCGTGGCTGTCTGGCGGAAGAATGACGAG
AATATCACCCTGGAAACCGTCTGCCACGATCCCAAGCTGCCCTACCACGAT
TTCATCCTGGAAGACGCCGCCAGCCCTAAGTGCATCATGAAAGAGAAAAAG
AAGCCTGGCGAGACCTTTTTCATGTGCTCCTGCAGCAGCGACGAATGCAAC
GACAATATCATCTTTAGCGAGGAATACAATACCAGCAACCCCGAC
(Human Tissue Factor 219)
AGCGGCACAACCAACACAGTCGCTGCCTATAACCTCACTTGGAAGAGCACC
AACTTCAAAACCATCCTCGAATGGGAACCCAAACCCGTTAACCAAGTTTAC
ACCGTGCAGATCAGCACCAAGTCCGGCGACTGGAAGTCCAAATGTTTCTAT
ACCACCGACACCGAGTGCGATCTCACCGATGAGATCGTGAAAGATGTGAAA
CAGACCTACCTCGCCCGGGTGTTTAGCTACCCCGCCGGCAATGTGGAGAGC
ACTGGTTCCGCTGGCGAGCCTTTATACGAGAACAGCCCCGAATTTACCCCT
TACCTCGAGACCAATTTAGGACAGCCCACCATCCAAAGCTTTGAGCAAGTT
GGCACAAAGGTGAATGTGACAGTGGAGGACGAGCGGACTTTAGTGCGGCGG
AACAACACCTTTCTCAGCCTCCGGGATGTGTTCGGCAAAGATTTAATCTAC
ACACTGTATTACTGGAAGTCCTCTTCCTCCGGCAAGAAGACAGCTAAAACC
AACACAAACGAGTTTTTAATCGACGTGGATAAAGGCGAAAACTACTGTTTC
AGCGTGCAAGCTGTGATCCCCTCCCGGACCGTGAATAGGAAAAGCACCGAT
AGCCCCGTTGAGTGCATGGGCCAAGAAAAGGGCGAGTTCCGGGAG
(Human IL-15)
AACTGGGTGAACGTCATCAGCGATTTAAAGAAGATCGAAGATTTAATTCAG
TCCATGCATATCGACGCCACTTTATACACAGAATCCGACGTGCACCCCTCT
TGTAAGGTGACCGCCATGAAATGTTTTTTACTGGAGCTGCAAGTTATCTCT
TTAGAGAGCGGAGACGCTAGCATCCACGACACCGTGGAGAATTTAATCATT
TTAGCCAATAACTCTTTATCCAGCAACGGCAACGTGACAGAGTCCGGCTGC
AAGGAGTGCGAAGAGCTGGAGGAGAAGAACATCAAGGAGTTTCTGCAATCC
TTTGTGCACATTGTCCAGATGTTCATCAATACCTCC

[1205] The amino acid sequence of TGFβ Receptor II/TF/IL-15 fusion protein (including the leader sequence) is as follows:

(Signal peptide)
MKWVTFISLLFLFSSAYS
(Human TGFβ Receptor II)
IPPHVQKSVNNDMIVTDNNGAVKFPQLCKFCDVRFSTCDNQKSCMSNCSIT
SICEKPQEVCVAVWRKNDENITLETVCHDPKLPYHDFILEDAASPKCIMKE
KKKPGETFFMCSCSSDECNDNIIFSEEYNTSNPDGGGGSGGGGSGGGGSIP
PHVQKSVNNDMIVTDNNGAVKFPQLCKFCDVRFSTCDNQKSCMSNCSITSI
CEKPQEVCVAVWRKNDENITLETVCHDPKLPYHDFILEDAASPKCIMKEKK
KPGETFFMCSCSSDECNDNIIFSEEYNTSNPD
(Human Tissue Factor 219)
SGTTNTVAAYNLTWKSTNFKTILEWEPKPVNQVYTVQISTKSGDWKSKCFY
TTDTECDLTDEIVKDVKQTYLARVFSYPAGNVESTGSAGEPLYENSPEFTP
YLETNLGQPTIQSFEQVGTKVNVTVEDERTLVRRNNTFLSLRDVFGKDLIY
TLYYWKSSSSGKKTAKTNTNEFLIDVDKGENYCFSVQAVIPSRTVNRKSTD
SPVECMGQEKGEFRE
(Human IL-15)
NWVNVISDLKKIEDLIQSMHIDATLYTESDVHPSCKVTAMKCFLLELQVIS
LESGDASIHDTVENLIILANNSLSSNGNVTESGCKECEELEEKNIKEFLQS
FVHIVQMFINTS

[1206] Constructs were also made by attaching anti-human CD16scFv directly linking to the N-terminus coding region of IL-15RαSu chain followed by the N-terminus coding region of IL-21 which was synthesized by Genewiz. The nucleic acid and protein sequences of a construct comprising the anti-human CD16scFv linked to the N-terminus of IL-15RαSu followed by the N-terminus coding region of IL-21 are shown below.

[1207] The nucleic acid sequence of the anti-CD16scFv/IL-15 RαSu/IL-21 construct (including signal peptide sequence) is as follows:

(Signal peptide)
ATGAAGTGGGTGACCTTCATCAGCCTGCTGTTCCTGTTCTCCAGCGCCTAC
TCC
(Anti-human CD16scFv)
TCCGAGCTGACCCAGGACCCTGCTGTGTCCGTGGCTCTGGGCCAGACCGTG
AGGATCACCTGCCAGGGCGACTCCCTGAGGTCCTACTACGCCTCCTGGTAC
CAGCAGAAGCCCGGCCAGGCTCCTGTGCTGGTGATCTACGGCAAGAACAAC
AGGCCCTCCGGCATCCCTGACAGGTTCTCCGGATCCTCCTCCGGCAACACC
GCCTCCCTGACCATCACAGGCGCTCAGGCCGAGGACGAGGCTGACTACTAC
TGCAACTCCAGGGACTCCTCCGGCAACCATGTGGTGTTCGGCGGCGGCACC
AAGCTGACCGTGGGCCATGGCGGCGGCGGCTCCGGAGGCGGCGGCAGCGGC
GGAGGAGGATCCGAGGTGCAGCTGGTGGAGTCCGGAGGAGGAGTGGTGAGG
CCTGGAGGCTCCCTGAGGCTGAGCTGTGCTGCCTCCGGCTTCACCTTCGAC
GACTACGGCATGTCCTGGGTGAGGCAGGCTCCTGGAAAGGGCCTGGAGTGG
GTGTCCGGCATCAACTGGAACGGCGGATCCACCGGCTACGCCGATTCCGTG
AAGGGCAGGTTCACCATCAGCAGGGACAACGCCAAGAACTCCCTGTACCTG
CAGATGAACTCCCTGAGGGCCGAGGACACCGCCGTGTACTACTGCGCCAGG
GGCAGGTCCCTGCTGTTCGACTACTGGGGACAGGGCACCCTGGTGACCGTG
TCCAGG
(Human IL-15R α sushi domain)
ATTACATGCCCCCCTCCCATGAGCGTGGAGCACGCCGACATCTGGGTGAAG
AGCTATAGCCTCTACAGCCGGGAGAGGTATATCTGTAACAGCGGCTTCAAG
AGGAAGGCCGGCACCAGCAGCCTCACCGAGTGCGTGCTGAATAAGGCTACC
AACGTGGCTCACTGGACAACACCCTCTTTAAAGTGCATCCGG
(Human IL-21)
CAGGGCCAGGACAGGCACATGATCCGGATGAGGCAGCTCATCGACATCGTC
GACCAGCTGAAGAACTACGTGAACGACCTGGTGCCCGAGTTTCTGCCTGCC
CCCGAGGACGTGGAGACCAACTGCGAGTGGTCCGCCTTCTCCTGCTTTCAG
AAGGCCCAGCTGAAGTCCGCCAACACCGGCAACAACGAGCGGATCATCAAC
GTGAGCATCAAGAAGCTGAAGCGGAAGCCTCCCTCCACAAACGCCGGCAGG
AGGCAGAAGCACAGGCTGACCTGCCCCAGCTGTGACTCCTACGAGAAGAAG
CCCCCCAAGGAGTTCCTGGAGAGGTTCAAGTCCCTGCTGCAGAAGATGATC
CATCAGCACCTGTCCTCCAGGACCCACGGCTCCGAGGACTCC

[1208] The amino acid sequence of the anti-CD16scFv/IL-15RαSu/IL-21 construct (including signal peptide sequence) is as follows:

(Signal peptide)
MKWVTFISLLFLFSSAYS
(Anti-human CD16scFv)
SELTQDPAVSVALGQTVRITCQGDSLRSYYASWYQQKPGQAPVLVIYGKNN
RPSGIPDRFSGSSSGNTASLTITGAQAEDEADYYCNSRDSSGNHVVFGGGT
KLTVGHGGGGSGGGGSGGGGSEVQLVESGGGVVRPGGSLRLSCAASGFTFD
DYGMSWVRQAPGKGLEWVSGINWNGGSTGYADSVKGRFTISRDNAKNSLYL
QMNSLRAEDTAVYYCARGRSLLFDYWGQGTLVTVSR
(Human IL-15R α sushi domain)
ITCPPPMSVEHADIWVKSYSLYSRERYICNSGFKRKAGTSSLTECVLNKAT
NVAHWTTPSLKCIR
(Human IL-21)
[sequence omitted]

[1209] In some cases, the leader peptide is cleaved from the intact polypeptide to generate the mature form that may be soluble or secreted.

[1210] The anti-CD16scFv/IL-15RαSu/IL-21 and TGFR/TF/IL-15 constructs were cloned into a modified retrovirus expression vectors as described previously (Hughes M S, Yu Y Y, Dudley M E, Zheng Z, Robbins P F, Li Y, et al. Transfer of a TCR gene derived from a patient with a marked antitumor response conveys highly active T-cell effector functions. Hum Gene Ther 2005; 16:457-72), and the expression vectors were transfected into CHO-K1 cells. Co-expression of the two constructs in CHO-K1 cells allowed for formation and secretion of the soluble TGFR/TF/IL-15:CD16scFv/IL-15RαSu/IL-21 protein complex (referred to as TGFRt15-16s21), which can be purified by anti-TF IgG1-based affinity and other chromatography methods.

### Interaction Between TGFRt15-16s21 and CHO Cells Expressing Human CD16b

[1211] CHO cells were transfected with human CD16b in a pMC plasmid and selected with 10 μg/mL of blasticidin for 10 days. Cells stably expressing CD16b were stained with 1.2 μg/mL of TGFRt15-16s21, containing anti-human CD16 scFv, or 7t15-21s, not containing anti-human CD16 scFv, as a negative control, and with biotinylated anti-human tissue factor antibody and PE conjugated streptavidin. As shown in FIGS. 84A and 84B, TGFRt15-16s21, which contains anti-human CD16scFv, showed positive binding, while 7t15-21s did not show binding.

### Effect of TGFRt15-16s21 on TGF/31 Activity in HEK-Blue TGFβ Cells

[1212] To evaluate the activity of TGFβRII in TGFRt15-16s21, the effect of TGFRt15-16s21 on the activity of TGFβ1 in HEK-Blue TGFβ cells was analyzed. HEK-Blue TGFβ cells (Invivogen) were washed twice with pre-warmed PBS and resuspended in the testing medium (DMEM, 10% heat-inactivated FCS, 1× glutamine, 1× anti-anti, and 2× glutamine) at 5×10⁵ cells/mL. In a flat-bottom 96-well plate, 50₁1.1 cells were added to each well (2.5×10⁴ cells/well) and followed with 50 μL 0.1 nM TGFβ1 (R&D systems). TGFRt15-16s21 or TGFR-Fc (R&D Systems) prepared at a 1:3 serial dilution was then added to the plate to reach a total volume of 200 μL. After 24 hrs of incubation at 37° C., 40 μL of induced HEK-Blue TGFβ cell supernatant was added to 160 μL pre-warmed QUANTI-Blue (Invivogen) in a flat-bottom 96-well plate, and incubated at 37° C. for 1-3 hrs. The OD values were then determined using a plate reader (Multiscan Sky) at 620-655 nM. The IC₅₀ of each protein sample was calculated with GraphPad Prism 7.04. The IC₅₀ of TGFRt15-16s21 and TGFR-Fc were 9127 pM and 460.6 pM respectively. These results showed that the TGFβRII domain in TGFRt15-16s21 was able to block the activity of TGFβ-1 in HEK-Blue TGFβ cells.

### The IL-15 in TGFRt15-16s21 Promotes IL-2R/3 and Common γ Chain Containing 32Dβ Cell Proliferation

[1213] To analyze the activity of IL-15 in TGFRt15-16s21, the IL-15 activity of TGFRt15-16s21 was compared to recombinant IL-15 using 32Dβ cells that express IL2Rβ and common γ chain, and evaluating their effects on promoting cell proliferation. IL-15 dependent 32Dβ cells were washed 5 times with IMDM-10% FBS and seeded in the wells at 2×10⁴ cells/well. Serially-diluted TGFRt15-16s21 or IL-15 were added to the cells (FIG. 86). Cells were incubated in a CO₂ incubator at 37° C. for 3 days. Cell proliferation was detected by adding 10 μL of WST1 to each well on day 3 and incubating for an additional 3 hours in a CO₂ incubator at 37° C. The absorbance at 450 nm was measured by analyzing the amount of formazan dye produced. The data are shown in FIG. 85. As shown in FIG. 86, TGFRt15-16s21 and IL-15 promoted 32Dβ cell proliferation, with the EC₅₀ of TGFRt15-16s21 and IL-15 being 51298 pM and 10.63 pM, respectively.

### Detection of IL-15, IL-21, and TGFβRII in TGFRt15-16s21 Using ELISA

[1214] A 96-well plate was coated with 100 μL (8 μg/mL) of anti-TF IgG1 in R5 (coating buffer) and incubated at room temperature (RT) for 2 hrs. The plates were washed 3 times and blocked with 100 μL of 1% BSA in PBS. TGFRt15-16s21 serially diluted at a 1:3 ratio was added and incubated at RT for 60 min. Following three washes, 50 ng/mL of biotinylated-anti-IL-15 antibody (BAM247, R&D Systems), 500 ng/mL of biotinylated-anti-IL-21 antibody (13-7218-81, R&D Systems), or 200 ng/mL of biotinylated-anti-TGFβRII antibody (BAF241, R&D Systems) was applied per well, and incubated at RT for 60 min. Following three washes, incubation with 0.25 μg/mL of HRP-SA (Jackson ImmunoResearch at 100 μL per well for 30 min at RT was carried out, followed by 4 washes and incubation with 100 μL of ABTS for 2 mins at RT. Absorbance was read at 405 nm. As shown in FIGS. 87A-87C, the IL-15, IL-21, and TGFβRII domains in TGFRt15-16s21 were detected by the respective antibodies.

### Purification Elution Chromatograph of TGFRt15-16s21 Using Anti-TF Antibody Affinity Column

[1215] TGFRt15-16s21 harvested from cell culture was loaded onto the anti-TF antibody affinity column equilibrated with 5 column volumes of PBS. After sample loading, the column was washed with 5 column volumes of PBS, followed by elution with 6 column volumes of 0.1M acetic acid (pH 2.9). A280 elution peak was collected and then neutralized to pH 7.5-8.0 with 1M Tris base. The neutralized sample was then buffer exchanged into PBS using Amicon centrifugal filters with a 30 KDa molecular weight cutoff. As shown in FIG. 88, the anti-TF antibody affinity column bound to TGFRt15-16s21, which contains tissue factor as a fusion partner. The buffer-exchanged protein sample was stored at 2-8° C. for further biochemical analyses and biological activity tests. After each elution, the anti-TF antibody affinity column was stripped using 6 column volumes of 0.1M glycine (pH 2.5). The column was then neutralized using 5 column volumes of PBS, and 7 column volumes of 20% ethanol for storage. The anti-TF antibody affinity column was connected to a GE Healthcare AKTA Avant system. The flow rate was 4 mL/min for all steps except for the elution step, which was 2 mL/min.

### Reduced SDS-PAGE of TGFRt15-16s21

[1216] To determine the purity and molecular weight of the TGFRt15-16s21 protein, protein sample purified with anti-TF antibody affinity column was analyzed by sodium dodecyl sulfate polyacrylamide gel (4-12% NuPage Bis-Tris gel) electrophoresis (SDS-PAGE) under reduced condition. After electrophoresis, the gel was stained with InstantBlue for about 30 min, followed by destaining overnight in purified water.

[1217] To verify that the TGFRt15-16s21 protein undergoes glycosylation after translation in CHO cells, a deglycosylation experiment was conducted using the Protein Deglycosylation Mix II kit from New England Biolabs according to the manufacturer's instructions. FIG. 89 shows results from the reduced SDS-PAGE analysis of the sample in non-deglycosylated (lane 1 in red outline) and deglycosylated (lane 2 in yellow outline) state. The results showed that the TGFRt15-16s21 protein is glycosylated when expressed in CHO cells. After deglycosylation, the purified sample showed expected molecular weights (69 kDa and 48 kDa) in the reduced SDS gel. Lane M was loaded with 104, of SeeBlue Plus2 Prestained Standard.

### Example 52: 7t15-7s Fusion Protein Generation and Characterization

[1218] A fusion protein complex was generated comprising IL-7/TF/IL-15 and IL-7/IL-15RαSu fusion proteins (FIG. 90 and FIG. 91). The human IL-7, tissue factor 219, and IL-15 sequences were obtained from the UniProt website and DNA for these sequences was synthesized by Genewiz. Specifically, a construct was made linking the IL-7 sequence to the N-terminus coding region of tissue factor 219 followed by the N-terminus coding region of IL-15.

[1219] The nucleic acid and protein sequences of a construct comprising IL-7 linked to the N-terminus of tissue factor 219 following with the N-terminus of IL-15 are shown below.

[1220] The nucleic acid sequence of 7t15 construct (including signal peptide sequence) is as follows:

(Signal peptide)
ATGAAGTGGGTGACCTTCATCAGCCTGCTGTTCCTGTTCTCCAGCGCCTAC
TCC
(Human IL 7)
GATTGCGACATCGAGGGCAAGGACGGCAAGCAGTACGAGAGCGTGCTGATG
GTGTCCATCGACCAGCTGCTGGACAGCATGAAGGAGATCGGCTCCAACTGC
CTCAACAACGAGTTCAACTTCTTCAAGCGGCACATCTGCGACGCCAACAAG
GAGGGCATGTTCCTGTTCAGGGCCGCCAGGAAACTGCGGCAGTTCCTGAAG
ATGAACTCCACCGGCGACTTCGACCTGCACCTGCTGAAGGTGTCCGAGGGC
ACCACCATCCTGCTGAACTGCACCGGACAGGTGAAGGGCCGGAAACCTGCT
GCTCTGGGAGAGGCCCAACCCACCAAGAGCCTGGAGGAGAACAAGTCCCTG
AAGGAGCAGAAGAAGCTGAACGACCTGTGCTTCCTGAAGAGGCTGCTGCAG
GAGATCAAGACCTGCTGGAACAAGATCCTGATGGGCACCAAGGAGCAT
(Human Tissue Factor 219)
AGCGGCACAACCAACACAGTCGCTGCCTATAACCTCACTTGGAAGAG
CACCAACTTCAAAACCATCCTCGAATGGGAACCCAAACCCGTTAACCAAGT
TTACACCGTGCAGATCAGCACCAAGTCCGGCGACTGGAAGTCCAAATGTTT
CTATACCACCGACACCGAGTGCGATCTCACCGATGAGATCGTGAAAGATGT
GAAACAGACCTACCTCGCCCGGGTGTTTAGCTACCCCGCCGGCAATGTGGA
GAGCACTGGTTCCGCTGGCGAGCCTTTATACGAGAACAGCCCCGAATTTAC
CCCTTACCTCGAGACCAATTTAGGACAGCCCACCATCCAAAGCTTTGAGCA
AGTTGGCACAAAGGTGAATGTGACAGTGGAGGACGAGCGGACTTTAGTGCG
GCGGAACAACACCTTTCTCAGCCTCCGGGATGTGTTCGGCAAAGATTTAAT
CTACACACTGTATTACTGGAAGTCCTCTTCCTCCGGCAAGAAGACAGCTAA
AACCAACACAAACGAGTTTTTAATCGACGTGGATAAAGGCGAAAACTACTG
TTTCAGCGTGCAAGCTGTGATCCCCTCCCGGACCGTGAATAGGAAAAGCAC
CGATAGCCCCGTTGAGTGCATGGGCCAAGAAAAGGGCGAGTTCCGGGAG
(Human IL-15)
AACTGGGTGAACGTCATCAGCGATTTAAAGAAGATCGAAGATTTAATTCAG
TCCATGCATATCGACGCCACTTTATACACAGAATCCGACGTGCACCCCTCT
TGTAAGGTGACCGCCATGAAATGTTTTTTACTGGAGCTGCAAGTTATCTCT
TTAGAGAGCGGAGACGCTAGCATCCACGACACCGTGGAGAATTTAATCATT
TTAGCCAATAACTCTTTATCCAGCAACGGCAACGTGACAGAGTCCGGCTGC
AAGGAGTGCGAAGAGCTGGAGGAGAAGAACATCAAGGAGTTTCTGCAATCC
TTTGTGCACATTGTCCAGATGTTCATCAATACCTCC

[1221] The amino acid sequence of 7t15 fusion protein (including the leader sequence) is as follows:

(Signal peptide)
MKWVTFISLLFLFSSAYS
(Human IL7)
DCDIEGKDGKQYESVLMVSIDQLLDSMKEIGSNCLNNEFNFFKRHICDANK
EGMFLFRAARKLRQFLKMNSTGDFDLHLLKVSEGTTILLNCTGQVKGRKPA
ALGEAQPTKSLEENKSLKEQKKLNDLCFLKRLLQEIKTCWNKILMGTKEH
(Human Tissue Factor 219)
SGTTNTVAAYNLTWKSTNFKTILEWEPKPVNQVYTVQISTKSGDWKSKCFY
TTDTECDLTDEIVKDVKQTYLARVFSYPAGNVESTGSAGEPLYENSPEFTP
YLETNLGQPTIQ SFEQVGTKVNVTVEDERTLVRRNNTFLSLRDVFGKDL
IYTLYYWKSSSSGKKTAKTNTNEFLIDVDKGENYCFSVQAVIPSRTVNRKS
TDSPVECMGQEKGEFRE
(Human IL-15)
NWVNVISDLKKIEDLIQSMHIDATLYTESDVHPSCKVTAMKCFLLELQVIS
LESGDASIHDTVENLIILANNSLSSNGNVTESGCKECEELEEKNIKEFLQS
FVHIVQMFINTS

[1222] Constructs were also made by linking the IL-7 sequence to the N-terminus coding region of IL-15RαSu chain which was synthesized by Genewiz. The nucleic acid and protein sequences of a construct comprising the IL-7 linked to the N-terminus of IL-15RαSu chain are shown below.

[1223] The nucleic acid sequence of 7s construct (including signal peptide sequence) is as follows:

(Signal peptide)
ATGAAGTGGGTGACCTTCATCAGCCTGCTGTTCCTGTTCTCCAGCGCCTAC
TCC
(Human IL7)
GATTGCGACATCGAGGGCAAGGACGGCAAGCAGTACGAGAGCGTGCTGATG
GTGTCCATCGACCAGCTGCTGGACAGCATGAAGGAGATCGGCTCCAACTGC
CTCAACAACGAGTTCAACTTCTTCAAGCGGCACATCTGCGACGCCAACAAG
GAGGGCATGTTCCTGTTCAGGGCCGCCAGGAAACTGCGGCAGTTCCTGAAG
ATGAACTCCACCGGCGACTTCGACCTGCACCTGCTGAAGGTGTCCGAGGGC
ACCACCATCCTGCTGAACTGCACCGGACAGGTGAAGGGCCGGAAACCTGCT
GCTCTGGGAGAGGCCCAACCCACCAAGAGCCTGGAGGAGAACAAGTCCCTG
AAGGAGCAGAAGAAGCTGAACGACCTGTGCTTCCTGAAGAGGCTGCTGCAG
GAGATCAAGACCTGCTGGAACAAGATCCTGATGGGCACCAAGGAGCAT
(Human IL-15R α sushi domain)
ATTACATGCCCCCCTCCCATGAGCGTGGAGCACGCCGACATCTGGGTGAAG
AGCTATAGCCTCTACAGCCGGGAGAGGTATATCTGTAACAGCGGCTTCAAG
AGGAAGGCCGGCACCAGCAGCCTCACCGAGTGCGTGCTGAATAAGGCTACC
AACGTGGCTCACTGGACAACACCCTCTTTAAAGTGCATCCGG

[1224] The amino acid sequence of 7s fusion protein (including the leader sequence) is as follows:

(Signal peptide)
MKWVTFISLLFLFSSAYS
(Human IL7)
DCDIEGKDGKQYESVLMVSIDQLLDSMKEIGSNCLNNEFNFFKRHICDANK
EGMFLFRAARKLRQFLKMNSTGDFDLHLLKVSEGTTILLNCTGQVKGRKPA
ALGEAQPTKSLEENKSLKEQKKLNDLCFLKRLLQEIKTCWNKILMGTKEH
(Human IL-15R α sushi domain)
ITCPPPMSVEHADIWVKSYSLYSRERYICNSGFKRKAGTSSLTECVLNKAT
NVAHWTTPSLKCIR

[1225] The IL-7/TF/IL-15 and IL-7/IL-15RαSu constructs were cloned into a modified retrovirus expression vectors as described previously (Hughes M S, Yu Y Y, Dudley M E, Zheng Z, Robbins P F, Li Y, et al. Transfer of a TCR gene derived from a patient with a marked antitumor response conveys highly active T-cell effector functions. Hum Gene Ther 2005; 16:457-72), and the expression vectors were transfected into CHO-K1 cells. Co-expression of the two constructs in CHO-K1 cells allowed for formation and secretion of the soluble IL-7/TF/IL-15:IL-7/IL-15RαSu protein complex referred to as 7t15-7s, which can be purified by anti-TF antibody IgG1 affinity and other chromatography methods.

Purification Elution Chromatograph of 7t15-7s Using Anti-TF Antibody Affinity Column

[1226] 7t15-7s harvested from cell culture was loaded onto the anti-TF antibody affinity column equilibrated with 5 column volumes of PBS. After sample loading, the column was washed with 5 column volumes of PBS, followed by elution with 6 column volumes of 0.1M acetic acid (pH 2.9). A280 elution peak was collected and then neutralized to pH 7.5-8.0 with 1M Tris base. The neutralized sample was then buffer exchanged into PBS using Amicon centrifugal filters with a 30 KDa molecular weight cutoff. As shown in FIG. 92, the anti-TF antibody affinity column bound to 7t15-7s which contains tissue factor (TF) as a fusion partner. The buffer-exchanged protein sample was stored at 2-8° C. for further biochemical analyses and biological activity tests. After each elution, the anti-TF antibody affinity column was stripped using 6 column volumes of 0.1M glycine (pH 2.5). The column was then neutralized using 5 column volumes of PBS, and 7 column volumes of 20% ethanol for storage. The anti-TF antibody affinity column was connected to a GE Healthcare AKTA Avant system. The flow rate was 4 mL/min for all steps except the elution step, which was 2 mL/min.

Immunostimulation of 7t15-7s in C57BL/6 Mice

[1227] 7t15-7s is a multi-chain polypeptide (a type A multi-chain polypeptide described herein) that includes the first polypeptide that is a soluble fusion of human IL-7, human tissue factor 219 fragment and human IL-15 (7t15), and the second polypeptide that is a soluble fusion of human IL-7 and sushi domain of human IL-15 receptor alpha chain (7s).

[1228] CHO cells were co-transfected with the IL7-TF-IL-15 (7t15) and IL7-IL-15Rαsushi domain (7s) vectors. The 7t15-7s complex was purified from the transfected CHO cell culture supernatant. The IL-7, IL-15 and tissue factor (TF) components were demonstrated in the complex by ELISA as shown in FIG. 93. A humanized anti-TF antibody monoclonal antibody (anti-TF IgG1) was used as the capture antibody to determine TF in 7t15-7s, and biotinylated anti-human IL-15 antibody (R&D systems) and biotinylated anti-human IL-7 antibody (R&D Systems) were used as the detection antibodies to respectively detect IL-15 and IL-7 in 7t15-7s, followed by peroxidase conjugated streptavidin (Jackson ImmunoResearch Lab) and ABTS substrate (Surmodics IVD, Inc.).

[1229] 7t15-7s was subcutaneously injected into C57BL/6 mice at 10 mg/kg to determine the immunostimulatory activity of 7t15-7s in vivo. C57BL/6 mice subcutaneously treated with PBS were used as control. The mouse spleens were collected and weighed day 4 post treatment. Single splenocytes suspensions were prepared, and with fluorochrome-conjugated anti-CD4, anti-CD8, and anti-NK1.1 antibodies and the percentage of CD4⁺ T cells, CD8⁺ T cells, and NK cells was analyzed by flow cytometry. The results showed that 7t15-7s was effective at expanding splenocytes based on spleen weight (FIG. 94A) and specifically, the percentages of CD8⁺ T cells and NK cells were higher compared to control-treated mice (FIG. 94B).

### Example 53: TGFRt15-TGFRs Fusion Protein Generation and Characterization

[1230] A fusion protein complex was generated comprising of TGFβ Receptor II/IL-15RαSu and TGFβ Receptor II/TF/IL-15 fusion proteins (FIG. 95 and FIG. 96). The human TGFβ Receptor II (Ile24-Asp159), tissue factor 219, and IL-15 sequences were obtained from the UniProt website and DNA for these sequences was synthesized by Genewiz. Specifically, a construct was made linking two TGFβ Receptor II sequences with a G4S(3) linker to generate a single chain version of TGFβ Receptor II and then directly linking to the N-terminus coding region of tissue factor 219 followed by the N-terminus coding region of IL-15.

[1231] The nucleic acid and protein sequences of a construct comprising two TGFβ Receptor II linked to the N-terminus of tissue factor 219 following with the N-terminus of IL-15 are shown below.

[1232] The nucleic acid sequence of the two TGFβ Receptor II/TF/IL-15 construct (including signal peptide sequence) is as follows:

(Signal peptide)
ATGAAGTGGGTGACCTTCATCAGCCTGCTGTTCCTGTTCTCCAGCGCCACT
TCC
(Two Human TGFβ Receptor II fragments)
ATCCCCCCCCATGTGCAAAAGAGCGTGAACAACGATATGATCGTGACCGAC
AACAACGGCGCCGTGAAGTTTCCCCAGCTCTGCAAGTTCTGCGATGTCAGG
TTCAGCACCTGCGATAATCAGAAGTCCTGCATGTCCAACTGCAGCATCACC
TCCATCTGCGAGAAGCCCCAAGAAGTGTGCGTGGCCGTGTGGCGGAAAAAT
GACGAGAACATCACCCTGGAGACCGTGTGTCACGACCCCAAGCTCCCTTAT
CACGACTTCATTCTGGAGGACGCTGCCTCCCCCAAATGCATCATGAAGGAG
AAGAAGAAGCCCGGAGAGACCTTCTTTATGTGTTCCTGTAGCAGCGACGAG
TGTAACGACAACATCATCTTCAGCGAAGAGTACAACACCAGCAACCCTGAT
GGAGGTGGCGGATCCGGAGGTGGAGGTTCTGGTGGAGGTGGGAGTATTCCT
CCCCACGTGCAGAAGAGCGTGAATAATGACATGATCGTGACCGATAACAAT
GGCGCCGTGAAATTTCCCCAGCTGTGCAAATTCTGCGATGTGAGGTTTTCC
ACCTGCGACAACCAGAAGTCCTGTATGAGCAACTGCTCCATCACCTCCATC
TGTGAGAAGCCTCAGGAGGTGTGCGTGGCTGTCTGGCGGAAGAATGACGAG
AATATCACCCTGGAAACCGTCTGCCACGATCCCAAGCTGCCCTACCACGAT
TTCATCCTGGAAGACGCCGCCAGCCCTAAGTGCATCATGAAAGAGAAAAAG
AAGCCTGGCGAGACCTTTTTCATGTGCTCCTGCAGCAGCGACGAATGCAAC
GACAATATCATCTTTAGCGAGGAATACAATACCAGCAACCCCGAC
(Human Tissue Factor 219)
AGCGGCACAACCAACACAGTCGCTGCCTATAACCTCACTTGGAAGAGCACC
AACTTCAAAACCATCCTCGAATGGGAACCCAAACCCGTTAACCAAGTTTAC
ACCGTGCAGATCAGCACCAAGTCCGGCGACTGGAAGTCCAAATGTTTCTAT
ACCACCGACACCGAGTGCGATCTCACCGATGAGATCGTGAAAGATGTGAAA
CAGACCTACCTCGCCCGGGTGTTTAGCTACCCCGCCGGCAATGTGGAGAGC
ACTGGTTCCGCTGGCGAGCCTTTATACGAGAACAGCCCCGAATTTACCCCT
TACCTCGAGACCAATTTAGGACAGCCCACCATCCAAAGCTTTGAGCAAGTT
GGCACAAAGGTGAATGTGACAGTGGAGGACGAGCGGACTTTAGTGCGGCGG
AACAACACCTTTCTCAGCCTCCGGGATGTGTTCGGCAAAGATTTAATCTAC
ACACTGTATTACTGGAAGTCCTCTTCCTCCGGCAAGAAGACAGCTAAAACC
AACACAAACGAGTTTTTAATCGACGTGGATAAAGGCGAAAACTACTGTTTC
AGCGTGCAAGCTGTGATCCCCTCCCGGACCGTGAATAGGAAAAGCACCGAT
AGCCCCGTTGAGTGCATGGGCCAAGAAAAGGGCGAGTTCCGGGAG
(Human IL-15)
AACTGGGTGAACGTCATCAGCGATTTAAAGAAGATCGAAGATTTAATCAGT
TCCATGCATATCGACGCCACTTTATACACAGAATCCGACGTGCACCCCTCT
TGTAAGGTGACCGCCATGAAATGTTTTTTACTGGAGCTGCAAGTTATCTCT
TTAGAGAGCGGAGACGCTAGCATCCACGACACCGTGGAGAATTTAATCATT
TTAGCCAATAACTCTTTATCCAGCAACGGCAACGTGACAGAGTCCGGCTGC
AAGGAGTGCGAAGAGCTGGAGGAGAAGAACATCAAGGAGTTTCTGCAATCC
TTTGTGCACATTGTCCAGATGTTCATCAATACCTCC

[1233] The amino acid sequence of TGFβ Receptor II/TF/IL-15 fusion protein (including the leader sequence) is as follows:

(Signal peptide)
MKWVTFISLLFLFSSAYS
(Human TGFβ Receptor II)
IPPHVQKSVNNDMIVTDNNGAVKFPQLCKFCDVRSTCDNQKSCMSNCSITS
ICEKPQEVCVAVWRKNDENITLETVCHDPKLPYHDFILEDAASPKCIMKEK
KKPGETFFMCSCSSDECNDNIIFSEEYNTSNPDGGGGSGGGGSGGGGSIPP
HVQKSVNNDMIVTDNNGAVKFPQLCKFCDVRFSTCDNQKSCMSNCSITSIC
EKPQEVCVAVWRKNDENITLETVCHDPKLPYHDFILEDAASPKCIMKEKKK
PGETFFMCSCSSDECNDNIIFSEEYNTSNPD
(Human Tissue Factor 219)
SGTTNTVAAYNLTWKSTNFKTILEWEPKPVNQVYTVQISTKSGDWKSKCFY
TTDTECDLTDEIVKDVKQTYLARVFSYPAGNVESTGSAGEPLYENSPEFTP
YLETNLGQPTIQSFEQVGTKVNVTVEDERTLVRRNNTFLSLRDVFGKDLIY
TLYYWKSSSSGKKTAKTNTNEFLIDVDKGENYCFSVQAVIPSRTVNRKSTD
SPVECMGQEKGEFRE
(Human IL-15)
NWVNVISDLKKIEDLIQSMHIDATLYTESDVHPSCKVTAMKCFLLELQVIS
LESGDASIHDTVENLIILANNSLSSNGNVTESGCKECEELEEKNIKEFLQS
FVHIVQMFINTS

[1234] Constructs were also made by attaching two TGFβ Receptor II directly to the IL-15RαSu chain which was synthesized by Genewiz. The nucleic acid and protein sequences of a construct comprising the TGFβ Receptor II linked to the N-terminus of IL-15RαSu are shown below.

[1235] The nucleic acid sequence of the TGFβ Receptor II/IL-15 RαSu construct (including signal peptide sequence) is as follows:

(Signal peptide)
ATGAAGTGGGTGACCTTCATCAGCCTGCTGTTCCTGTTCTCCAGCGCCTAC
TCC
(Two human TGFβ Receptor II fragments)
ATCCCCCCCCATGTGCAAAAGAGCGTGAACAACGATATGATCGTGACCGAC
AACAACGGCGCCGTGAAGTTTCCCCAGCTCTGCAAGTTCTGCGATGTCAGG
TTCAGCACCTGCGATAATCAGAAGTCCTGCATGTCCAACTGCAGCATCACC
TCCATCTGCGAGAAGCCCCAAGAAGTGTGCGTGGCCGTGTGGCGGAAAAAT
GACGAGAACATCACCCTGGAGACCGTGTGTCACGACCCCAAGCTCCCTTAT
CACGACTTCATTCTGGAGGACGCTGCCTCCCCCAAATGCATCATGAAGGAG
AAGAAGAAGCCCGGAGAGACCTTCTTTATGTGTTCCTGTAGCAGCGACGAG
TGTAACGACAACATCATCTTCAGCGAAGAGTACAACACCAGCAACCCTGAT
GGAGGTGGCGGATCCGGAGGTGGAGGTTCTGGTGGAGGTGGGAGTATTCCT
CCCCACGTGCAGAAGAGCGTGAATAATGACATGATCGTGACCGATAACAAT
GGCGCCGTGAAATTTCCCCAGCTGTGCAAATTCTGCGATGTGAGGTTTTCC
ACCTGCGACAACCAGAAGTCCTGTATGAGCAACTGCTCCATCACCTCCATC
TGTGAGAAGCCTCAGGAGGTGTGCGTGGCTGTCTGGCGGAAGAATGACGAG
AATATCACCCTGGAAACCGTCTGCCACGATCCCAAGCTGCCCTACCACGAT
TTCATCCTGGAAGACGCCGCCAGCCCTAAGTGCATCATGAAAGAGAAAAAG
AAGCCTGGCGAGACCTTTTTCATGTGCTCCTGCAGCAGCGACGAATGCAAC
GACAATATCATCTTTAGCGAGGAATACAATACCAGCAACCCCGAC
(Human IL-15R α sushi domain)
ATTACATGCCCCCCTCCCATGAGCGTGGAGCACGCCGACATCTGGGTGAAG
AGCTATAGCCTCTACAGCCGGGAGAGGTATATCTGTAACAGCGGCTTCAAG
AGGAAGGCCGGCACCAGCAGCCTCACCGAGTGCGTGCTGAATAAGGCTACC
AACGTGGCTCACTGGACAACACCCTCTTTAAAGTGCATCCGG

[1236] The amino acid sequence of the two TGFβ Receptor II/IL-15RαSu construct (including signal peptide sequence) is as follows:

(Signal peptide)
MKWVTFISLLFLFSSAYS
(Two human TGFβ Receptor II extra-cellular domains)
IPPHVQKSVNNDMIVTDNNGAVKFPQLCKFCDVRFSTCDNQKSCMSNCSIT
SICEKPQEVCVAVWRKNDENITLETVCHDPKLPYHDFILEDAASPKCIMKE
KKKPGETFFMCSCSSDECNDNIIFSEEYNTSNPDGGGGSGGGGSGGGGSIP
PHVQKSVNNDMIVTDNNGAVKFPQLCKFCDVRFSTCDNQKSCMSNCSITSI
CEKPQEVCVAVWRKNDENITLETVCHDPKLPYHDFILEDAASPKCIMKEKK
KPGETFFMCSCSSDECNDNIIFSEEYNTSNPD
(Human IL-15R α sushi domain)
ITCPPPMSVEHADIWVKSYSLYSRERYICNSGFKRKAGTSLTECVLNKAT
NVAHWTTPSLKCIR

[1237] In some cases, the leader peptide is cleaved from the intact polypeptide to generate the mature form that may be soluble or secreted.

[1238] The TGFβR/IL-15RαSu and TGFβR/TF/IL-15 constructs were cloned into a modified retrovirus expression vectors as described previously (Hughes M S, Yu Y Y, Dudley M E, Zheng Z, Robbins P F, Li Y, et al. Transfer of a TCR gene derived from a patient with a marked antitumor response conveys highly active T-cell effector functions. Hum Gene Ther 2005; 16:457-72), and the expression vectors were transfected into CHO-K1 cells. Co-expression of the two constructs in CHO-K1 cells allowed for formation and secretion of the soluble TGFβR/TF/IL-15:TGFβR/IL-15RαSu protein complex (referred to as TGFRt15-TGFRs), which can be purified by anti-TF IgG1 affinity and other chromatography methods.

### Effect of TGFRt15-TGFRs on TGFβ1 Activity in HEK-Blue TGFβ Cells

[1239] To evaluate the activity of TGFβRII in TGFRt15-TGFRs, the effect of TGFRt15-16s21 on the activity of TGFβ1 in HEK-Blue TGFβ cells was analyzed. HEK-Blue TGFβ cells (Invivogen) were washed twice with pre-warmed PBS and resuspended in the testing medium (DMEM, 10% heat-inactivated FCS, 1× glutamine, 1× anti-anti, and 2× glutamine) at 5×10⁵ cells/mL. In a flat-bottom 96-well plate, 50 μL cells were added to each well (2.5×10⁴ cells/well) and followed with 50 μL 0.1 nM TGFβ1 (R&D systems). TGFRt15-16s21 or TGFR-Fc (R&D Systems) prepared at a 1:3 serial dilution was then added to the plate to reach a total volume of 200 μL. After 24 hrs of incubation at 37° C., 40 μL of induced HEK-Blue TGFβ cell supernatant was added to 160 μL pre-warmed QUANTI-Blue (Invivogen) in a flat-bottom 96-well plate, and incubated at 37° C. for 1-3 hrs. The OD values were then determined using a plate reader (Multiscan Sky) at 620-655 nM (FIG. 97). The IC₅₀ of each protein sample was calculated with GraphPad Prism 7.04. The IC₅₀ of TGFRt15-TGFRs and TGFR-Fc were 216.9 pM and 460.6 pM respectively. These results showed that the TGFβRII domain in TGFRt15-TGFRs was able to block the activity of TGFβ1 in HEK-Blue TGFβ cells.

### The IL-15 in TGFRt15-TGFRs Promotes IL-2R/3 and Common γ Chain Containing 32Dβ Cell Proliferation

[1240] To evaluate the activity of IL-15 in TGFRt15-TGFRs, the IL-15 activity of TGFRt15-TGFRs was compared to recombinant IL-15 using 32Dβ cells that express IL2Rβ and common γ chain, and evaluating their effects on promoting cell proliferation. IL-15 dependent 32Dβ cells were washed 5 times with IMDM-10% FBS and seeded in the wells at 2×10⁴ cells/well. Serially-diluted TGFRt15-TGFRs or IL-15 were added to the cells (FIG. 98). Cells were incubated in a CO₂ incubator at 37° C. for 3 days. Cell proliferation was detected by adding 10 μL of WST1 to each well on day 3 and incubating for an additional 3 hours in a CO₂ incubator at 37° C. The absorbance at 450 nm was measured by analyzing the amount of formazan dye produced. As shown in FIG. 98. TGFRt15-TGFRs and IL-15 promoted 32Dβ cell proliferation, with the EC₅₀ of TGFRt15-16s21 and IL-15 being 1901 pM and 10.63 pM, respectively.

Detection of IL-15 and TGFβRII Domains in TGFRt15-TGFRs with Corresponding Antibodies Using ELISA

[1241] A 96-well plate was coated with 100 μL (8 μg/mL) of anti-TF IgG1 in R5 (coating buffer) and incubated at room temperature (RT) for 2 hrs. The plates were washed 3 times and blocked with 100 μL of 1% BSA in PBS. TGFRt15-TGFRs was added at a 1:3 serial dilution, and incubated at RT for 60 min. After 3 washes, 50 ng/mL of biotinylated-anti-IL-15 antibody (BAN/247, R&D Systems), or 200 ng/mL of biotinylated-anti-TGFbRII antibody (BAF241, R&D Systems) was added to the wells and incubated at RT for 60 min. Next the plates were washed 3 times, and 0.25 μg/mL of HRP-SA (Jackson ImmunoResearch) at 100 μL per well was added and incubated for 30 min at RT, followed by 4 washes and incubation with 100 μL of ABTS for 2 mins at RT. Absorbance at 405 nm was read. As shown in FIGS. 99A and 99B, the IL-15 and TGFβRII domains in TGFRt15-TGFRs were detected by the individual antibodies.

Purification Elution Chromatograph of TGFRt15-TGFRs from Anti-TF Antibody Affinity Column

[1242] TGFRt15-TGFRs harvested from cell culture was loaded onto the anti-TF antibody affinity column equilibrated with 5 column volumes of PBS. After sample loading, the column was washed with 5 column volumes of PBS, followed by elution with 6 column volumes of 0.1M acetic acid (pH 2.9). A280 elution peak was collected and then neutralized to pH 7.5-8.0 with 1M Tris base. The neutralized sample was then buffer exchanged into PBS using Amicon centrifugal filters with a 30 KDa molecular weight cutoff. As shown in FIG. 100, the anti-TF antibody affinity column bound to TGFRt15-TGFRs which contains TF as a fusion partner. The buffer-exchanged protein sample was stored at 2-8° C. for further biochemical analyses and biological activity tests. After each elution, the anti-TF antibody affinity column was stripped using 6 column volumes of 0.1M glycine (pH 2.5). The column was then neutralized using 5 column volumes of PBS, and 7 column volumes of 20% ethanol for storage. The anti-TF antibody affinity column was connected to a GE Healthcare AKTA Avant system. The flow rate was 4 mL/min for all steps except for the elution step, which was 2 mL/min.

### Analytical Size Exclusion Chromatography (SEC) Analysis of TGFRt15-TGFRs

[1243] A Superdex 200 Increase 10/300 GL gel filtration column (from GE Healthcare) was connected to an AKTA Avant system (from GE Healthcare). The column was equilibrated with 2 column volumes of PBS. The flow rate was 0.7 mL/min. A sample containing TGFRt15-TGFRs in PBS was injected into the Superdex 200 column using a capillary loop, and analyzed by SEC. The SEC chromatograph of the sample is shown in FIG. 101. The SEC results showed four protein peaks for TGFRt15-TGFRs.

### Reduced SDS PAGE Analysis of TGFRt15-TGFRs

[1244] To determine the purity and molecular weight of the TGFRt15-TGFRs protein, protein sample purified with anti-TF antibody affinity column was analyzed by sodium dodecyl sulfate polyacrylamide gel (4-12% NuPage Bis-Tris gel) electrophoresis (SDS-PAGE) method under reduced condition. After electrophoresis, the gel was stained with InstantBlue for about 30 min, followed by destaining overnight in purified water.

[1245] To verify that the TGFRt15-TGFRs protein undergoes glycosylation after translation in CHO cells, a deglycosylation experiment was conducted using the Protein Deglycosylation. Mix II kit from New England Biolabs and the manufacturer's instructions. FIG. 102 shows the reduced SDS-PAGE analysis of the sample in non-deglycosylated (lane 1 in red outline) and deglycosylated (lane 2 in yellow outline) state. The results showed that the TGFRt15-TGFRs protein is glycosylated when expressed in CHO cells. After deglycosylation, the purified sample showed expected molecular weights (69 kDa and 39 kDa) in the reduced SDS gel. Lane M was loaded with 10 ul of SeeBlue Plus2 Prestained Standard.

### Immunostimulatory Activity of TGFRt15-TGFRs in C57BL/6 Mice

[1246] TGFRt15-TGFRs is a multi-chain polypeptide (a type A multi-chain polypeptide described herein) that includes a first polypeptide that is a soluble fusion of two TGFβRII domains, human tissue factor 219 fragment and human IL-15, and the second polypeptide that is a soluble fusion of two TGFβRII domains and sushi domain of human IL-15 receptor alpha chain.

[1247] Wild type C57BL/6 mice were treated subcutaneously with either control solution or with TGFRt15-TGFRs at a dosage of 0.3 mg/kg, 1 mg/kg, 3 mg/kg, or 10 mg/kg. Four days after treatment, spleen weight and the percentages of various immune cell types present in the spleen were evaluated. As shown in FIG. 103A, the spleen weight in mice treated with TGFRt15-TGFRs increased with increasing dosage of TGFRt15-TGFRs. Moreover, the spleen weight in mice treated with 1 mg/kg, 3 mg/kg, and 10 mg/kg of TGFRt15-TGFRs were higher as compared to mice treated with the control solution, respectively. In addition, the percentages of CD4⁺ T cells, CD8⁺ T cells, NK cells, and CD19⁺ B cells present in the spleen of control-treated and TGFRt15-TGFRs-treated mice were evaluated. As shown in FIG. 103B, in the spleens of mice treated with TGFRt15-TGFRs, the percentages of CD8⁺ T cells and NK cells both increased with increasing dosage of TGFRt15-TGFRs. Specifically, the percentages of CD8⁺ T cells were higher in mice treated with 0.3 mg/kg, 3 mg/kg, and 10 mg/kg of TGFRt15-TGFRs compared to control-treated mice, and the percentages of NK cells were higher in mice treated with 0.3 mg/kg, 1 mg/kg, 3 mg/kg, and 10 mg/kg of TGFRt15-TGFRs compared to control-treated mice. These results demonstrate that TGFRt15-TGFRs is able to stimulate immune cells in the spleen, in particular CD8⁺ T cells and NK cells.

[1248] The pharmacokinetics of TGFRt15-TGFRs molecules were evaluated in wild type C57BL/6 mice. The mice were treated subcutaneously with TGFRt15-TGFRs at a dosage of 3 mg/kg. The mouse blood was drained from tail vein at various time points and the serum was prepared. The TGFRt15-TGFRs concentrations in mouse serum was determined with ELISA (capture: anti-human tissue factor antibody; detection: biotinylated anti-human TGFβ receptor antibody and followed by peroxidase conjugated streptavidin and ABTS substrate). The results showed that the half-life of TGFRt15-TGFRs was 12.66 hours in C57BL/6 mice.

[1249] The mouse splenocytes were prepared in order to evaluate the immunostimulatory activity of TGFRt15-TGFRs over time in mice. As shown in FIG. 104A, the spleen weight in mice treated with TGFRt15-TGFRs increased 48 hours posttreatment and continued to increase over time. In addition, the percentages of CD4⁺ T cells, CD8⁺ T cells, NK cells, and CD19⁺ B cells present in the spleen of control-treated and TGFRt15-TGFRs-treated mice were evaluated. As shown in FIG. 104B, in the spleens of mice treated with TGFRt15-TGFRs, the percentages of CD8⁺ T cells and NK cells both increased at 48 hours after treatment and were higher and higher overtime after the single dose treatment. These results further demonstrate that TGFRt15-TGFRs is able to stimulate immune cells in the spleen, in particular CD8⁺ T cells and NK cells.

[1250] Furthermore, the dynamic proliferation of immune cells based on Ki67 expression of splenocytes and cytotoxicity potential based on granzyme B expression were evaluated in splenocytes isolated from mice following a single dose (3 mg/kg) of TGFRt15-TGFRs. As shown in FIGS. 105A and 105B, in the spleens of mice treated with TGFRt15-TGFRs, the expression of Ki67 and granzyme B by NK cells increased at 24 hours after treatment and its expression of CD8⁺ T cells and NK cells both increased at 48 hours and later time points after the single dose treatment. These results demonstrate that TGFRt15-TGFRs not only increases the numbers of CD8⁺ T cells and NK cells but also enhance the cytotoxicity of these cells. The single dose treatment of TGFRt15-TGFRs led CD8⁺ T cells and NK cells to proliferate for at least 4 days.

[1251] The cytotoxicity of the splenocytes from TGFRt15-TGFRs-treated mice against tumor cells was also evaluated. Mouse Moloney leukemia cells (Yac-1) were labeled with CellTrace Violet and were used as tumor target cells. Splenocytes were prepared from TGFRt15-TGFRs (3 mg/kg)-treated mouse spleens at various time points post treatment and were used as effector cells. The target cells were mixed with effector cells at an E:T ratio=10:1 and incubated at 37° C. for 20 hours. Target cell viability was assessed by analysis of propidium iodide positive, violet-labeled Yac-1 cells using flow cytometry. Percentage of Yac-1 tumor inhibition was calculated using the formula, (1-[viable Yac-1 cell number in experimental sample]/[viable Yac-1 cell number in the sample without splenocytes])×100. As shown in FIG. 106, splenocytes from TGFRt15-TGFRs-treated mice had stronger cytotoxicity against Yac-1 cells than the control mouse splenocytes.

Tumor Size Analysis in Response to Chemotherapy and/or TGFRt15-TGFRs

[1252] Pancreatic cancer cells (SW1990, ATCC® CRL-2172) were subcutaneously (s.c.) injected into C57BL/6 scid mice (The Jackson Laboratory, 001913, 2×10⁶ cells/mouse, in 1004, HBSS) to establish the pancreatic cancer mouse model. Two weeks after tumor cell injection, chemotherapy was initiated in these mice intraperitoneally with a combination of Abraxane (Celgene, 68817-134, 5 mg/kg, i.p.) and Gemcitabine (Sigma Aldrich, G6423, 40 mg/kg, i.p.), followed by immunotherapy with TGFRt15-TGFRs (3 mg/kg, s.c.) in 2 days. The procedure above was considered one treatment cycle and was repeated for another 3 cycles (1 cycle/week). Control groups were set up as the SW1990-injected mice that received PBS, chemotherapy (Gemcitabine and Abraxane), or TGFRt15-TGFRs alone. Along with the treatment cycles, tumor size of each animal was measured and recorded every other day, until the termination of the experiment 2 months after the SW1990 cells were injected. Measurement of the tumor volumes were analyzed by group and the results indicated that the animals receiving a combination of chemotherapy and TGFRt15-TGFRs had significantly smaller tumors comparing to the PBS group, whereas neither chemotherapy nor TGFRt15-TGFRs therapy alone work as sufficiently as the combination (FIG. 107).

### In Vitro Senescent B16F10 Melanoma Model

[1253] Next, in vitro killing of senescent B16F10 melanoma cells by activated mouse NK cells was evaluated. B16F10 senescence cells (B16F10-SNC) cells were labelled with CellTrace violet and incubated for 16 hrs with different E:T ratio of in vitro 2t2-activated mouse NK cells (isolated from spleen of C57BL/6 mice injected with TGFRt15-TGFRs10 mg/kg for 4 days). The cells were trypsinized, washed and resuspended in complete media containing propidium iodide (PI) solution. The cytotoxicity was assessed by flow cytometry (FIG. 108).

### Example 54: 7t15-21s137L (Long Version) Fusion Protein Creation and Characterization

[1254] A fusion protein complex was generated comprising of IL-21/IL-15RαSu/CD137L and IL-7/TF/IL-15 fusion proteins (FIG. 109 and FIG. 110). Specifically, a construct was made linking the IL-7 sequence to the N-terminus coding region of tissue factor 219 followed by the N-terminus coding region of IL-15. The nucleic acid and protein sequences of a construct comprising IL-7 linked to the N-terminus of tissue factor 219 following with the N-terminus of IL-15 are shown below.

[1255] The nucleic acid sequence of the 7t15 construct (including signal peptide sequence) is as follows:

(Signal peptide)
ATGAAGTGGGTGACCTTCATCAGCCTGCTGTTCCTGTTCTCCAGCGCCTAC
TCC
(Human IL7)
GATTGCGACATCGAGGGCAAGGACGGCAAGCAGTACGAGAGCGTGCTGATG
GTGTCCATCGACCAGCTGCTGGACAGCATGAAGGAGATCGGCTCCAACTGC
CTCAACAACGAGTTCAACTTCTTCAAGCGGCACATCTGCGACGCCAACAAG
GAGGGCATGTTCCTGTTCAGGGCCGCCAGGAAACTGCGGCAGTTCCTGAAG
ATGAACTCCACCGGCGACTTCGACCTGCACCTGCTGAAGGTGTCCGAGGGC
ACCACCATCCTGCTGAACTGCACCGGACAGGTGAAGGGCCGGAAACCTGCT
GCTCTGGGAGAGGCCCAACCCACCAAGAGCCTGGAGGAGAACAAGTCCCTG
AAGGAGCAGAAGAAGCTGAACGACCTGTGCTTCCTGAAGAGGCTGCTGCAG
GAGATCAAGACCTGCTGGAACAAGATCCTGATGGGCACCAAGGAGCAT
(Human Tissue Factor 219)
AGCGGCACAACCAACACAGTCGCTGCCTATAACCTCACTTGGAAGAGCACC
AACTTCAAAACCATCCTCGAATGGGAACCCAAACCCGTTAACCAAGTTTAC
ACCGTGCAGATCAGCACCAAGTCCGGCGACTGGAAGTCCAAATGTTTCTAT
ACCACCGACACCGAGTGCGATCTCACCGATGAGATCGTGAAAGATGTGAAA
CAGACCTACCTCGCCCGGGTGTTTAGCTACCCCGCCGGCAATGTGGAGAGC
ACTGGTTCCGCTGGCGAGCCTTTATACGAGAACAGCCCCGAATTTACCCCT
TACCTCGAGACCAATTTAGGACAGCCCACCATCCAAAGCTTTGAGCAAGTT
GGCACAAAGGTGAATGTGACAGTGGAGGACGAGCGGACTTTAGTGCGGCGG
AACAACACCTTTCTCAGCCTCCGGGATGTGTTCGGCAAAGATTTAATCTAC
ACACTGTATTACTGGAAGTCCTCTTCCTCCGGCAAGAAGACAGCTAAAACC
AACACAAACGAGTTTTTAATCGACGTGGATAAAGGCGAAAACTACTGTTTC
AGCGTGCAAGCTGTGATCCCCTCCCGGACCGTGAATAGGAAAAGCACCGAT
AGCCCCGTTGAGTGCATGGGCCAAGAAAAGGGCGAGTTCCGGGAG
(Human IL-15)
AACTGGGTGAACGTCATCAGCGATTTAAAGAAGATCGAAGATTTAATTCAG
TCCATGCATATCGACGCCACTTTATACACAGAATCCGACGTGCACCCCTCT
TGTAAGGTGACCGCCATGAAATGTTTTTTACTGGAGCTGCAAGTTATCTCT
TTAGAGAGCGGAGACGCTAGCATCCACGACACCGTGGAGAATTTAATCATT
TTAGCCAATAACTCTTTATCCAGCAACGGCAACGTGACAGAGTCCGGCTGC
AAGGAGTGCGAAGAGCTGGAGGAGAAGAACATCAAGGAGTTTCTGCAATCC
TTTGTGCACATTGTCCAGATGTTCATCAATACCTCC

[1256] The amino acid sequence of 7t15 fusion protein (including the leader sequence) is as follows:

(Signal peptide)
MKWVTFISLLFLFSSAYS
(Human IL7)
DCDIEGKDGKQYESVLMVSIDQLLDSMKEIGSNCLNNEFNFFKRHICDANK
EGMFLFRAARKLRQFLKMNSTGDFDLHLLKVSEGTTILLNCTGQVKGRKPA
ALGEAQPTKSLEENKSLKEQKKLNDLCFLKRLLQEIKTCWNKILMGTKEH
(Human Tissue Factor 219)
SGTTNTVAAYNLTWKSTNFKTILEWEPKPVNQVYTVQISTKSGDWKSKCFY
TTDTECDLTDEIVKDVKQTYLARVFSYPAGNVESTGSAGEPLYENSPEFTP
YLETNLGQPTIQSFEQVGTKVNVTVEDERTLVRRNNTFLSLRDVFGKDLIY
TLYYWKSSSSGKKTAKTNTNEFLIDVDKGENYCFSVQAVIPSRTVNRKSTD
SPVECMGQEKGEFRE
(Human IL-15)
NWVNVISDLKKIEDLIQSMHIDATLYTESDVHPSCKVTAMKCFLLELQVIS
LESGDASIHDTVENLIILANNSLSSNGNVTESGCKECEELEEKNIKEFLQS
FVHIVQMFINTS

[1257] The nucleic acid and protein sequences of the 21s137L are shown below. The nucleic acid sequence of the 21s137L construct (including signal peptide sequence) is as follows:

(Signal peptide)
ATGAAGTGGGTGACCTTCATCAGCCTGCTGTTCCTGTTCTCCAGCGCCTAC
TCC
(Human IL-21)
CAGGGCCAGGACAGGCACATGATCCGGATGAGGCAGCTCATCGACATCGTC
GACCAGCTGAAGAACTACGTGAACGACCTGGTGCCCGAGTTTCTGCCTGCC
CCCGAGGACGTGGAGACCAACTGCGAGTGGTCCGCCTTCTCCTGCTTTCAG
AAGGCCCAGCTGAAGTCCGCCAACACCGGCAACAACGAGCGGATCATCAAC
GTGAGCATCAAGAAGCTGAAGCGGAAGCCTCCCTCCACAAACGCCGGCAGG
AGGCAGAAGCACAGGCTGACCTGCCCCAGCTGTGACTCCTACGAGAAGAAG
CCCCCCAAGGAGTTCCTGGAGAGGTTCAAGTCCCTGCTGCAGAAGATGATC
CATCAGCACCTGTCCTCCAGGACCCACGGCTCCGAGGACTCC
(Human IL-15R α sushi domain)
ATTACATGCCCCCCTCCCATGAGCGTGGAGCACGCCGACATCTGGGTGAAG
AGCTATAGCCTCTACAGCCGGGAGAGGTATATCTGTAACAGCGGCTTCAAG
AGGAAGGCCGGCACCAGCAGCCTCACCGAGTGCGTGCTGAATAAGGCTACC
AACGTGGCTCACTGGACAACACCCTCTTTAAAGTGCATCCGG
((G4S)3 linker)
GGCGGTGGAGGATCCGGAGGAGGTGGCTCCGGCGGCGGAGGATCT
(Human CD137L)
CGCGAGGGTCCCGAGCTTTCGCCCGACGATCCCGCCGGCCTCTTGGACCTG
CGGCAGGGCATGTTTGCGCAGCTGGTGGCCCAAAATGTTCTGCTGATCGAT
GGGCCCCTGAGCTGGTACAGTGACCCAGGCCTGGCAGGCGTGTCCCTGACG
GGGGGCCTGAGCTACAAAGAGGACACGAAGGAGCTGGTGGTGGCCAAGGCT
GGAGTCTACTATGTCTTCTTTCAACTAGAGCTGCGGCGCGTGGTGGCCGGC
GAGGGCTCAGGCTCCGTTTCACTTGCGCTGCACCTGCAGCCACTGCGCTCT
GCTGCTGGGGCCGCCGCCCTGGCTTTGACCGTGGACCTGCCACCCGCCTCC
TCCGAGGCTCGGAACTCGGCCTTCGGTTTCCAGGGCCGCTTGCTGCACCTG
AGTGCCGGCCAGCGCCTGGGCGTCCATCTTCACACTGAGGCCAGGGCACGC
CATGCCTGGCAGCTTACCCAGGGCGCCACAGTCTTGGGACTCTTCCGGGTG
ACCCCCGAAATCCCAGCCGGACTCCCTTCACCGAGGTCGGAA

[1258] The amino acid sequence of 21s137L fusion protein (including the leader sequence) is as follows:

(Signal peptide)
MKWVTFISLLFLFSSAYS
(Human IL-21)
[sequence omitted]
(Human IL-15R α sushi domain)
ITCPPPMSVEHADIWVKSYSLYSRERYICNSGFKRKAGTSSLTECVLNKAT
NVAHWTTPSLKCIR
((G4S)3 linker)
GGGGSGGGGSGGGGS
(Human CD137L)
REGPELSPDDPAGLLDLRQGMFAQLVAQNVLLIDGPLSWYSDPGLAGVSLT
GGLSYKEDTKELVVAKAGVYYVFFQLELRRVVAGEGSGSVSLALHLQPLRS
AAGAAALALTVDLPPASSEARNSAFGFQGRLLHLSAGQRLGVHLHTEARAR
HAWQLTQGATVLGLFRVTPEIPAGLPSPRSE

[1259] In some cases, the leader peptide is cleaved from the intact polypeptide to generate the mature form that may be soluble or secreted.

[1260] The IL-21/IL-15RαSu/CD137L and IL-7/TF/IL-15 constructs were cloned into a modified retrovirus expression vectors as described previously (Hughes M S, Yu Y Y, Dudley M E, Zheng Z, Robbins P F, Li Y, et al. Transfer of a TCR gene derived from a patient with a marked antitumor response conveys highly active T-cell effector functions. Hum Gene Ther 2005; 16:457-72), and the expression vectors were transfected into CHO-K1 cells. Co-expression of the two constructs in CHO-K1 cells allowed for formation and secretion of the soluble IL-7/TF/IL-15: IL-21/IL-15RαSu/CD137L protein complex (referred to as 7t15-21s137L), which can be purified by anti-TF antibody IgG1 affinity and other chromatography methods.

Purification Elution Chromatograph of 7t15-21s137L Using Anti-TF Antibody Affinity Column

[1261] 7t15-21s137L harvested from cell culture was loaded onto the anti-TF antibody affinity column equilibrated with 5 column volumes of PBS. After sample loading, the column was washed with 5 column volumes of PBS, followed by elution with 6 column volumes of 0.1M acetic acid (pH 2.9). A280 elution peak was collected and then neutralized to pH 7.5-8.0 with 1M Tris base. The neutralized sample was then buffer exchanged into PBS using Amicon centrifugal filters with a 30 KDa molecular weight cutoff. As shown in FIG. 111, the anti-TF antibody affinity column bound to 7t15-21s137L which contains TF as a fusion partner. The buffer-exchanged protein sample was stored at 2-8° C. for further biochemical analyses and biological activity tests. After each elution, the anti-TF antibody affinity column was stripped using 6 column volumes of 0.1M glycine (pH 2.5). The column was then neutralized using 5 column volumes of PBS, and 7 column volumes of 20% ethanol for storage. The anti-TF antibody affinity column was connected to a GE Healthcare AKTA Avant system. The flow rate was 4 mL/min for all steps except for the elution step, which was 2 mL/min. FIG. 112 shows the analytical SEC profile of 7t15-21s137L.

### Example 55: 7t15-21s137L (Short Version) Fusion Protein Generation and Characterization

[1262] A fusion protein complex was generated comprising of IL-21/IL-15RαSu/CD137L and IL-7/TF/IL-15 fusion proteins. Specifically, a construct was made linking the IL-7 sequence to the N-terminus coding region of tissue factor 219 followed by the N-terminus coding region of IL-15. The nucleic acid and protein sequences of a construct comprising IL-7 linked to the N-terminus of tissue factor 219 following with the N-terminus of IL-15 are shown below.

[1263] The nucleic acid sequence of 7t15 construct (including signal peptide sequence) is as follows:

(Signal peptide)
ATGAAGTGGGTGACCTTCATCAGCCTGCTGTTCCTGTTCTCCAGCGCCTAC
TCC
(Human IL 7)
GATTGCGACATCGAGGGCAAGGACGGCAAGCAGTACGAGAGCGTGCTGATG
GTGTCCATCGACCAGCTGCTGGACAGCATGAAGGAGATCGGCTCCAACTGC
CTCAACAACGAGTTCAACTTCTTCAAGCGGCACATCTGCGACGCCAACAAG
GAGGGCATGTTCCTGTTCAGGGCCGCCAGGAAACTGCGGCAGTTCCTGAAG
ATGAACTCCACCGGCGACTTCGACCTGCACCTGCTGAAGGTGTCCGAGGGC
ACCACCATCCTGCTGAACTGCACCGGACAGGTGAAGGGCCGGAAACCTGCT
GCTCTGGGAGAGGCCCAACCCACCAAGAGCCTGGAGGAGAACAAGTCCCTG
AAGGAGCAGAAGAAGCTGAACGACCTGTGCTTCCTGAAGAGGCTGCTGCAG
GAGATCAAGACCTGCTGGAACAAGATCCTGATGGGCACCAAGGAGCAT
(Human Tissue Factor 219)
AGCGGCACAACCAACACAGTCGCTGCCTATAACCTCACTTGGAAGAGCACC
AACTTCAAAACCATCCTCGAATGGGAACCCAAACCCGTTAACCAAGTTTAC
ACCGTGCAGATCAGCACCAAGTCCGGCGACTGGAAGTCCAAATGTTTCTAT
ACCACCGACACCGAGTGCGATCTCACCGATGAGATCGTGAAAGATGTGAAA
CAGACCTACCTCGCCCGGGTGTTTAGCTACCCCGCCGGCAATGTGGAGAGC
ACTGGTTCCGCTGGCGAGCCTTTATACGAGAACAGCCCCGAATTTACCCCT
TACCTCGAGACCAATTTAGGACAGCCCACCATCCAAAGCTTTGAGCAAGTT
GGCACAAAGGTGAATGTGACAGTGGAGGACGAGCGGACTTTAGTGCGGCGG
AACAACACCTTTCTCAGCCTCCGGGATGTGTTCGGCAAAGATTTAATCTAC
ACACTGTATTACTGGAAGTCCTCTTCCTCCGGCAAGAAGACAGCTAAAACC
AACACAAACGAGTTTTTAATCGACGTGGATAAAGGCGAAAACTACTGTTTC
AGCGTGCAAGCTGTGATCCCCTCCCGGACCGTGAATAGGAAAAGCACCGAT
AGCCCCGTTGAGTGCATGGGCCAAGAAAAGGGCGAGTTCCGGGAG
(Human IL-15)
AACTGGGTGAACGTCATCAGCGATTTAAAGAAGATCGAAGATTTAATTCAG
TCCATGCATATCGACGCCACTTTATACACAGAATCCGACGTGCACCCCTCT
TGTAAGGTGACCGCCATGAAATGTTTTTTACTGGAGCTGCAAGTTATCTCT
TTAGAGAGCGGAGACGCTAGCATCCACGACACCGTGGAGAATTTAATCATT
TTAGCCAATAACTCTTTATCCAGCAACGGCAACGTGACAGAGTCCGGCTGC
AAGGAGTGCGAAGAGCTGGAGGAGAAGAACATCAAGGAGTTTCTGCAATCC
TTTGTGCACATTGTCCAGATGTTCATCAATACCTCC

[1264] The amino acid sequence of 7t15 fusion protein (including the leader sequence) is as follows:

(Signal peptide)
MKWVTFISLLFLFSSAYS
(Human IL7)
DCDIEGKDGKQYESVLMVSIDQLLDSMKEIGSNCLNNEFNFFKRHICDANK
EGMFLFRAARKLRQFLKMNSTGDFDLHLLKVSEGTTILLNCTGQVKGRKPA
ALGEAQPTKSLEENKSLKEQKKLNDLCFLKRLLQEIKTCWNKILMGTKEH
(Human Tissue Factor 219)
SGTTNTVAAYNLTWKSTNFKTILEWEPKPVNQVYTVQISTKSGDWKSKCFY
TTDTECDLTDEIVKDVKQTYLARVFSYPAGNVESTGSAGEPLYENSPEFTP
YLETNLGQPTIQSFEQVGTKVNVTVEDERTLVRRNNTFLSLRDVFGKDLIY
TLYYWKSSSSGKKTAKTNTNEFLIDVDKGENYCFSVQAVIPSRTVNRKSTD
SPVECMGQEKGEFRE
(Human IL-15)
NWVNVISDLKKIEDLIQSMHIDATLYTESDVHPSCKVTAMKCFLLELQVIS
LESGDASIHDTVENLIILANNSLSSNGNVTESGCKECEELEEKNIKEFLQS
FVHIVQMFINTS

[1265] The nucleic acid and protein sequences of the 21s137L (short version) are shown below. The nucleic acid sequence of 21s137L (short version) construct (including signal peptide sequence) is as follows:

(Signal peptide)
ATGAAGTGGGTGACCTTCATCAGCCTGCTGTTCCTGTTCTCCAGCGCCTAC
TCC
(Human IL-21)
CAGGGCCAGGACAGGCACATGATCCGGATGAGGCAGCTCATCGACATCGTC
GACCAGCTGAAGAACTACGTGAACGACCTGGTGCCCGAGTTTCTGCCTGCC
CCCGAGGACGTGGAGACCAACTGCGAGTGGTCCGCCTTCTCCTGCTTTCAG
AAGGCCCAGCTGAAGTCCGCCAACACCGGCAACAACGAGCGGATCATCAAC
GTGAGCATCAAGAAGCTGAAGCGGAAGCCTCCCTCCACAAACGCCGGCAGG
AGGCAGAAGCACAGGCTGACCTGCCCCAGCTGTGACTCCTACGAGAAGAAG
CCCCCCAAGGAGTTCCTGGAGAGGTTCAAGTCCCTGCTGCAGAAGATGATC
CATCAGCACCTGTCCTCCAGGACCCACGGCTCCGAGGACTCC
(Human IL-15R α sushi domain)
ATTACATGCCCCCCTCCCATGAGCGTGGAGCACGCCGACATCTGGGTGAAG
AGCTATAGCCTCTACAGCCGGGAGAGGTATATCTGTAACAGCGGCTTCAAG
AGGAAGGCCGGCACCAGCAGCCTCACCGAGTGCGTGCTGAATAAGGCTACC
AACGTGGCTCACTGGACAACACCCTCTTTAAAGTGCATCCGG
((G4S)3 linker)
GGCGGTGGAGGATCCGGAGGAGGTGGCTCCGGCGGCGGAGGATCT
(Human CD137 Ligand short version)
GATCCCGCCGGCCTCTTGGACCTGCGGCAGGGCATGTTTGCGCAGCTGGTG
GCCCAAAATGTTCTGCTGATCGATGGGCCCCTGAGCTGGTACAGTGACCCA
GGCCTGGCAGGCGTGTCCCTGACGGGGGGCCTGAGCTACAAAGAGGACACG
AAGGAGCTGGTGGTGGCCAAGGCTGGAGTCTACTATGTCTTCTTTCAACTA
GAGCTGCGGCGCGTGGTGGCCGGCGAGGGCTCAGGCTCCGTTTCACTTGCG
CTGCACCTGCAGCCACTGCGCTCTGCTGCTGGGGCCGCCGCCCTGGCTTTG
ACCGTGGACCTGCCACCCGCCTCCTCCGAGGCTCGGAACTCGGCCTTCGGT
TTCCAGGGCCGCTTGCTGCACCTGAGTGCCGGCCAGCGCCTGGGCGTCCAT
CTTCACACTGAGGCCAGGGCACGCCATGCCTGGCAGCTTACCCAGGGCGCC
ACAGTCTTGGGACTCTTCCGGGTGACCCCCGAAATC

[1266] The amino acid sequence of the 21s137L (short version) construct (including signal peptide sequence) is as follows:

(Signal peptide)
MKWVTFISLLFLFSSAYS
(Human IL-21)
[sequence omitted]
(Human IL-15R α sushi domain)
ITCPPPMSVEHADIWVKSYSLYSRERYICNSGFKRKAGTSSLTECVLNKAT
NVAHWTTPSLKCIR
((G4S)3 linker)
GGGGSGGGGSGGGGS
(Human CD137 Ligand short version)
DPAGLLDLRQGMFAQLVAQNVLLIDGPLSWYSDPGLAGVSLTGGLSYKEDT
KELVVAKAGVYYVFFQLELRRVVAGEGSGSVSLALHLQPLRSAAGAAALAL
TVDLPPASSEARNSAFGFQGRLLHLSAGQRLGVHLHTEARARHAWQLTQGA
TVLGLFRVTPEI

[1267] The IL-21/IL-15RαSu/CD137L (short version) and IL-7/TF/IL-15 constructs were cloned into a modified retrovirus expression vectors as described previously (Hughes M S, Yu Y Y, Dudley M E, Zheng Z, Robbins P F, Li Y, et al. Transfer of a TCR gene derived from a patient with a marked antitumor response conveys highly active T-cell effector functions. Hum Gene Ther 2005; 16:457-72), and the expression vectors were transfected into CHO-K1 cells. Co-expression of the two constructs in CHO-K1 cells allowed for formation and secretion of the soluble IL-7/TF/IL-15: IL-21/IL-15RαSu/CD137L protein complex (referred to as 7t15-21s137L (short version)), which can be purified by anti-TF antibody IgG1 affinity and other chromatography methods.

Binding of 7t15-21s137L (Short Version) to CD137 (4.1BB)

[1268] On day 1, a 96-well plate was coated with 100 μL (2.5 μg/mL) of GAH IgG Fc (G-102-C, R&D Systems) in R5 (coating buffer) or R5 only and incubated at 4° C., overnight. On day 2, the plates were washed three times and blocked with 300 μL of 1% BSA in PBS at 37° C. for 2 hrs. 10 ng/mL of 4.1BB/Fc (838-4B, R&D Systems) was added at 100 μL/well and incubated for 2 hrs at RT. After three washes, the 7t15-21s137L or 7t15-21s serially diluted at a 1/3 ratio (starting at 10 nM), and incubated at 4° C. overnight. On day 3, following 3 washes, 300 ng/mL of biotinylated-anti-hTF antibody (BAF2339, R&D Systems) was added at 100 μL per well and incubated at RT for 2 hrs. The plate was then washed three times and incubated with 0.25 μg/mL of HRP-SA (Jackson ImmuneResearch) at 100 μL per well for 30 min, followed by 3 washes and incubation with 100 μL of ABTS for 2 mins at RT. Absorbance was read at 405 nm. As shown in FIG. 113, 7t15-21s137L (short version) showed significant interaction with 4.1BB/Fc (blue line) as compared to 7t15-21s.

Detection of IL-15, IL-21, and IL-7 in 7t15-21s137L (Short Version) with ELISA

[1269] A 96-well plate was coated with 100 μL (8 μg/mL) of anti-TF antibody IgG1 in R5 (coating buffer) and incubated at RT for 2 hrs. The plates were washed 3 times and blocked with 100 μL of 1% BSA in PBS. 7t15-21s137L (short version), serially diluted at a 1:3 ratio was added, and incubated at RT for 60 min. After three washes, 50 ng/mL of biotinylated-anti-IL-15 antibody (BAM247, R&D Systems), 500 ng/mL of biotinylated-anti-IL21 antibody (13-7218-81, R&D Systems), or 500 ng/mL of biotinylated-anti-IL7 antibody (506602, R&D Systems) was added to the wells and incubated at RT for 60 min. After three washes and incubation with 0.25 μg/mL of HRP-SA (Jackson ImmunoResearch) at 100 μL per well was carried out for 30 min at RT, followed by four washes and incubation with 100 μL of ABTS for 2 mins at RT. Absorbance was read at 405 nm. As shown in FIGS. 114A-114C, the IL-15, IL-21, and IL-7 domains in 7t15-21s137L (short version) were detected by the respective antibodies.

The IL-15 in 7t15-1s137L (Short Version) Promotes IL2Rαβγ Containing CTLL2 Cell Proliferation

[1270] To evaluate the IL-15 activity of 7t15-21s137L (short version), 7t15-21s137L (short version) was compared with recombinant IL-15 in promoting proliferation of IL2Rαβγ expressing CTLL2 cells. IL-15-dependent CTLL2 cells were washed 5 times with IMDM-10% FBS and seeded to the wells at 2×10⁴ cells/well. Serially diluted 7t15-21s137L (short version) or IL-15 were added to the cells (FIG. 115). Cells were incubated in a CO₂ incubator at 37° C. for 3 days. Cell proliferation was detected by adding 10 μL of WST1 to each well on day 3 and incubated for an additional 3 hours in a CO₂ incubator at 37° C. The amount of formazan dye produced was analyzed by measuring the absorbance at 450 nm. As shown in FIG. 115, 7t15-21s137L (short version) and IL-15 promoted CTLL2 cell proliferation. The EC₅₀ of 7t15-21s137L (short version) and IL-15 was 55.91 pM and 6.22 pM, respectively.

The IL-21 in 7t15-1s137L (Short Version) Promotes IL21R Containing B9 Cell Proliferation

[1271] To evaluate the IL-21 activity of 7t15-21s137L (short version), 7t15-21s137L (short version) was compared with recombinant IL-21 in promoting proliferation of IL-21R expressing B9 cells. IL-21R containing B9 cells were washed 5 times with RPMI-10% FBS and seeded to the wells at 1×10⁴ cells/well. Serially diluted 7t15-21s137L (short version) or IL-21 were added to the cells (FIG. 116). Cells were incubated in a CO₂ incubator at 37° C. for 5 days. Cell proliferation was detected by adding 10 μL of WST1 to each well on day 5 and incubated for an additional 4 hours in a CO₂ incubator at 37° C. The amount of formazan dye produced was analyzed by measuring the absorbance at 450 inn. As shown in FIG. 116, 7t15-21s137L (short version) and IL-21 promoted B9 cell proliferation. The EC₅₀ of 7t15-21s137L (short version) and IL-21 was 1041 nM and 72.55 nM, respectively.

### Example 56: 7t15-TGFRs Fusion Protein Generation and Characterization

[1272] A fusion protein complex was generated comprising of TGFβ Receptor II/IL-15RαSu and IL-7/TF/IL-15 fusion proteins (FIG. 117 and FIG. 118). The human TGFβ Receptor II (Ile24-Asp159), tissue factor 219, IL-15, and IL-7 sequences were obtained from the UniProt website and DNA for these sequences was synthesized by Genewiz. Specifically, a construct was made linking the IL-7 sequence to the N-terminus coding region of tissue factor 219 followed by the N-terminus coding region of IL-15. The nucleic acid and protein sequences of a construct comprising IL-7 linked to the N-terminus of tissue factor 219 following with the N-terminus of IL-15 are shown below.

[1273] The nucleic acid sequence of the 7t15 construct (including signal peptide sequence) is as follows:

(Signal peptide)
ATGAAGTGGGTGACCTTCATCAGCCTGCTGTTCCTGTTCTCCAGCGCCTAC
TCC
(Human IL7)
GATTGCGACATCGAGGGCAAGGACGGCAAGCAGTACGAGAGCGTGCTGATG
GTGTCCATCGACCAGCTGCTGGACAGCATGAAGGAGATCGGCTCCAACTGC
CTCAACAACGAGTTCAACTTCTTCAAGCGGCACATCTGCGACGCCAACAAG
GAGGGCATGTTCCTGTTCAGGGCCGCCAGGAAACTGCGGCAGTTCCTGAAG
ATGAACTCCACCGGCGACTTCGACCTGCACCTGCTGAAGGTGTCCGAGGGC
ACCACCATCCTGCTGAACTGCACCGGACAGGTGAAGGGCCGGAAACCTGCT
GCTCTGGGAGAGGCCCAACCCACCAAGAGCCTGGAGGAGAACAAGTCCCTG
AAGGAGCAGAAGAAGCTGAACGACCTGTGCTTCCTGAAGAGGCTGCTGCAG
GAGATCAAGACCTGCTGGAACAAGATCCTGATGGGCACCAAGGAGCAT
(Human Tissue Factor 219)
AGCGGCACAACCAACACAGTCGCTGCCTATAACCTCACTTGGAAGAGCACC
AACTTCAAAACCATCCTCGAATGGGAACCCAAACCCGTTAACCAAGTTTAC
ACCGTGCAGATCAGCACCAAGTCCGGCGACTGGAAGTCCAAATGTTTCTAT
ACCACCGACACCGAGTGCGATCTCACCGATGAGATCGTGAAAGATGTGAAA
CAGACCTACCTCGCCCGGGTGTTTAGCTACCCCGCCGGCAATGTGGAGAGC
ACTGGTTCCGCTGGCGAGCCTTTATACGAGAACAGCCCCGAATTTACCCCT
TACCTCGAGACCAATTTAGGACAGCCCACCATCCAAAGCTTTGAGCAAGTT
GGCACAAAGGTGAATGTGACAGTGGAGGACGAGCGGACTTTAGTGCGGCGG
AACAACACCTTTCTCAGCCTCCGGGATGTGTTCGGCAAAGATTTAATCTAC
ACACTGTATTACTGGAAGTCCTCTTCCTCCGGCAAGAAGACAGCTAAAACC
AACACAAACGAGTTTTTAATCGACGTGGATAAAGGCGAAAACTACTGTTTC
AGCGTGCAAGCTGTGATCCCCTCCCGGACCGTGAATAGGAAAAGCACCGAT
AGCCCCGTTGAGTGCATGGGCCAAGAAAAGGGCGAGTTCCGGGAG
(Human IL-15)
AACTGGGTGAACGTCATCAGCGATTTAAAGAAGATCGAAGATTTAATTCAG
TCCATGCATATCGACGCCACTTTATACACAGAATCCGACGTGCACCCCTCT
TGTAAGGTGACCGCCATGAAATGTTTTTTACTGGAGCTGCAAGTTATCTCT
TTAGAGAGCGGAGACGCTAGCATCCACGACACCGTGGAGAATTTAATCATT
TTAGCCAATAACTCTTTATCCAGCAACGGCAACGTGACAGAGTCCGGCTGC
AAGGAGTGCGAAGAGCTGGAGGAGAAGAACATCAAGGAGTTTCTGCAATCC
TTTGTGCACATTGTCCAGATGTTCATCAATACCTCC

[1274] The amino acid sequence of 7t15 fusion protein (including the leader sequence) is as follows:

(Signal peptide)
MKWVTFISLLFLFSSAYS
(Human IL7)
DCDIEGKDGKQYESVLMVSIDQLLDSMKEIGSNCLNNEFNFFKRHICDANK
EGMFLFRAARKLRQFLKMNSTGDFDLHLLKVSEGTTILLNCTGQVKGRKPA
ALGEAQPTKSLEENKSLKEQKKLNDLCFLKRLLQEIKTCWNKILMGTKEH
(Human Tissue Factor 219)
SGTTNTVAAYNLTWKSTNFKTILEWEPKPVNQVYTVQISTKSGDWKSKCFY
TTDTECDLTDEIVKDVKQTYLARVFSYPAGNVESTGSAGEPLYENSPEFTP
YLETNLGQPTIQSFEQVGTKVNVTVEDERTLVRRNNTFLSLRDVFGKDLIY
TLYYWKSSSSGKKTAKTNTNEFLIDVDKGENYCFSVQAVIPSRTVNRKSTD
SPVECMGQEKGEFRE
(Human IL-15)
NWVNVISDLKKIEDLIQSMHIDATLYTESDVHPSCKVTAMKCFLLELQVIS
LESGDASIHDTVENLIILANNSLSSNGNVTESGCKECEELEEKNIKEFLQS
FVHIVQMFINTS

[1275] Constructs were also made by attaching two TGFβ Receptor II directly to the IL-15RαSu chain which was synthesized by Genewiz. The nucleic acid and protein sequences of a construct comprising the TGFβ Receptor II linked to the N-terminus of IL-15RαSu are shown below.

[1276] The nucleic acid sequence of the TGFRs construct (including signal peptide sequence) is as follows:

(Signal peptide)
ATGAAGTGGGTGACCTTCATCAGCCTGCTGTTCCTGTTCTCCAGCGCCTAC
TCC
(Human TGFβ Receptor II fragments)
ATCCCCCCCCATGTGCAAAAGAGCGTGAACAACGATATGATCGTGACCGAC
AACAACGGCGCCGTGAAGTTTCCCCAGCTCTGCAAGTTCTGCGATGTCAGG
TTCAGCACCTGCGATAATCAGAAGTCCTGCATGTCCAACTGCAGCATCACC
TCCATCTGCGAGAAGCCCCAAGAAGTGTGCGTGGCCGTGTGGCGGAAAAAT
GACGAGAACATCACCCTGGAGACCGTGTGTCACGACCCCAAGCTCCCTTAT
CACGACTTCATTCTGGAGGACGCTGCCTCCCCCAAATGCATCATGAAGGAG
AAGAAGAAGCCCGGAGAGACCTTCTTTATGTGTTCCTGTAGCAGCGACGAG
TGTAACGACAACATCATCTTCAGCGAAGAGTACAACACCAGCAACCCTGAT
GGAGGTGGCGGATCCGGAGGTGGAGGTTCTGGTGGAGGTGGGAGTATTCCT
CCCCACGTGCAGAAGAGCGTGAATAATGACATGATCGTGACCGATAACAAT
GGCGCCGTGAAATTTCCCCAGCTGTGCAAATTCTGCGATGTGAGGTTTTCC
ACCTGCGACAACCAGAAGTCCTGTATGAGCAACTGCTCCATCACCTCCATC
TGTGAGAAGCCTCAGGAGGTGTGCGTGGCTGTCTGGCGGAAGAATGACGAG
AATATCACCCTGGAAACCGTCTGCCACGATCCCAAGCTGCCCTACCACGAT
TTCATCCTGGAAGACGCCGCCAGCCCTAAGTGCATCATGAAAGAGAAAAAG
AAGCCTGGCGAGACCTTTTTCATGTGCTCCTGCAGCAGCGACGAATGCAAC
GACAATATCATCTTTAGCGAGGAATACAATACCAGCAACCCCGAC
(Human IL-15R α sushi domain)
ATTACATGCCCCCCTCCCATGAGCGTGGAGCACGCCGACATCTGGGTGAAG
AGCTATAGCCTCTACAGCCGGGAGAGGTATATCTGTAACAGCGGCTTCAAG
AGGAAGGCCGGCACCAGCAGCCTCACCGAGTGCGTGCTGAATAAGGCTACC
AACGTGGCTCACTGGACAACACCCTCTTTAAAGTGCATCCGG
The amino acid sequence of TGFRs fusion protein
(including the leader sequence) is as follows:
(Signal peptide)
MKWVTFISLLFLFSSAYS
(Human TGFβ Receptor II)
IPPHVQKSVNNDMIVTDNNGAVKFPQLCKFCDVRFSTCDNQKSCMSNCSIT
SICEKPQEVCVAVWRKNDENITLETVCHDPKLPYHDFILEDAASPKCIMKE
KKKPGETFFMCSCSSDECNDNIIFSEEYNTSNPDGGGGSGGGGSGGGGSIP
PHVQKSVNNDMIVTDNNGAVKFPQLCKFCDVRFSTCDNQKSCMSNCSITSI
CEKPQEVCVAVWRKNDENITLETVCHDPKLPYHDFILEDAASPKCIMKEKK
KPGETFFMCSCSSDECNDNIIFSEEYNTSNPD
(Human IL-15R α sushi domain)
ITCPPPMSVEHADIWVKSYSLYSRERYICNSGFKRKAGTSSLTECVLNKAT
NVAHWTTPSLKCIR

[1277] Effect of 7t15-TGFRs on TGFβ1 Activity in HEK-Blue TGFβ Cells

[1278] To evaluate the activity of TGFβR in 7t15-TGFRs, the effect of 7t15-TGFRs on the activity of TGFβ1 in HEK-Blue TGFβ cells was analyzed. HEK-Blue TGFβ cells (Invivogen) were washed twice with pre-warmed PBS and resuspended in the testing medium (DMEM, 10% heat-inactivated FCS, 1× glutamine, 1× anti-anti, and 2× glutamine) at 5×10⁵ cells/mL. In a flat-bottom 96-well plate, 50 μL cells were added to each well (2.5×10⁴ cells/well) and followed with 50 μL 0.1 nM TGFβ1 (R&D systems). 7t15-TGFRs or TGFR-Fc (R&D Systems) prepared at a 1:3 serial dilution was then added to the plate to reach a total volume of 200 μL. After 24 hrs of incubation at 37° C., 40 μL of induced HEK-Blue TGFβ cell supernatant was added to 160 μL pre-warmed QUANTI-Blue (Invivogen) in a flat-bottom 96-well plate, and incubated at 37° C. for 1-3 hrs. The OD values were then determined using a plate reader (Multiscan Sky) at 620-655 nM. The data are shown in FIG. 119. The IC₅₀ of each protein sample was calculated with GraphPad Prism 7.04. The IC₅₀ of 7t15-TGFRs and TGFR-Fc were 1142 pM and 558.6 pM respectively. These results showed that the TGFβR in 7t15-TGFRs was able to block the activity of TGFβ1 in HEK-Blue TGFβ cells.

Detection of IL-15, TGFβRII, and IL-7 in 7t15-TGFRs with ELISA

[1279] A 96-well plate was coated with 100 μL (8 μg/mL) of anti-TF antibody IgG1 in R5 (coating buffer) and incubated at room temperature (RT) for 2 hrs. The plates were washed three times and blocked with 100 μL of 1% BSA in PBS. Serial dilution of 7t15-TGFRs (1:3 ratio) was added, and incubated at RT for 60 mins. After 3 washes, 50 ng/mL of biotinylated-anti-IL-15 antibody (BAM247, R&D Systems), 200 ng/mL of biotinylated-anti-TGFbRII antibody (BAF241, R&D Systems), or 500 ng/mL of biotinylated-anti-IL-7 antibody (506602, R&D Systems) was added and incubated at RT for 60 min. Following three washes, incubation with 0.25 μg/mL of HRP-SA (Jackson ImmunoResearch) at 100 μL per well was carried out for 30 min at RT, followed by 4 washes and incubation with 100 μL of ABTS for 2 mins at RT. Absorbance was read at 405 nm. As shown in FIGS. 120A-120C, the IL-15, TGFR, and IL-7 in 7t15-TGFRs were detected by the respective antibodies.

The IL-15 in 7t15-TGFRs Promotes IL-2R/3 and Common γ Chain Containing 32Dβ Cell Proliferation

[1280] To evaluate the activity of IL-15 in 7t15-TGFRs, 7t15-TGFRs was compared to recombinant IL-15 using 32Dβ cells that express IL2Rβ and common γ chain, and evaluating their effects on promoting cell proliferation. IL-15 dependent 32Dβ cells were washed 5 times with IMDM-10% FBS and seeded in the wells at 2×10⁴ cells/well. Serially-diluted 7t15-TGFRs or IL-15 were added to the cells (FIG. 121). Cells were incubated in a CO₂ incubator at 37° C. for 3 days. Cell proliferation was detected by adding 10 μL of WST1 to each well on day 3 and incubating for an additional 3 hours in a CO₂ incubator at 37° C. The amount of formazan dye produced was analyzed by measuring the absorbance at 450 nm. As shown in FIG. 121, 7t15-TGFRs and IL-15 promoted 32Dβ cell proliferation, with the EC₅₀ of 7t15-TGFRs and IL-15 being I26 nM and 16.63 pM, respectively.

Purification Elution Chromatograph of 7t15-TGFRs Using Anti-TF Antibody Affinity Column

[1281] 7t15-TGFRs harvested from cell culture was loaded onto the anti-TF antibody affinity column equilibrated with 5 column volumes of PBS. After sample loading, the column was washed with 5 column volumes of PBS, followed by elution with 6 column volumes of 0.1M acetic acid (pH 2.9). A280 elution peak was collected and then neutralized to pH 7.5-8.0 with 1M Tris base. The neutralized sample was then buffer exchanged into PBS using Amicon centrifugal filters with a 30 KDa molecular weight cutoff. As shown in FIG. 122, the anti-TF antibody affinity column can bind 7t15-TGFRs which contains TF as a fusion partner of 7t15-TGFRs. The buffer-exchanged protein sample was stored at 2-8° C. for further biochemical analyses and biological activity tests. After each elution, the anti-TF antibody affinity column was stripped using 6 column volumes of 0.1M glycine (pH 2.5). The column was then neutralized using 5 column volumes of PBS, and 7 column volumes of 20% ethanol for storage. The anti-TF antibody affinity column was connected to a GE Healthcare AKTA Avant system. The flow rate was 4 mL/min for all steps except for the elution step, which was 2 mL/min.

Reduced SDS-PAGE Analysis of 7t15-TGFRs

[1282] To determine the purity and molecular weight of the protein, 7t15-TGFRs protein sample purified with anti-TF antibody affinity column was analyzed by sodium dodecyl sulfate polyacrylamide gel (4-12% NuPage Bis-Tris gel) electrophoresis (SDS-PAGE) method under reduced condition. After electrophoresis, the gel was stained with InstantBlue for about 30 min, followed by destaining overnight in purified water.

[1283] To verify that the 7t15-TGFRs protein undergoes glycosylation after translation in CHO cells, a deglycosylation experiment was conducted using the Protein Deglycosylation Mix II kit from New England Biolabs and the manufacturer's instructions. FIG. 123 shows reduced SDS-PAGE analysis of the sample in non-deglycosylated (lane 1 in red outline) and deglycosylated (lane 2 in yellow outline) state. These results showed that the protein is glycosylated when it is expressed in CHO cells. After deglycosylation, the purified sample showed expected molecular weights (55 kDa and 39 kDa) in reduced SDS gel. Lane M was loaded with 10 ul of SeeBlue Plus2 Prestained Standard.

Characterization of 7t15-TGFRs

[1284] 7t15-TGFRs is a multi-chain polypeptide (a type A multi-chain polypeptide described herein) that includes the first polypeptide that is a soluble fusion of human IL-7, human tissue factor 219 fragment and human IL-15 (7t15), and the second polypeptide that is a soluble fusion of single chain two TGFβRII domains and sushi domain of human IL-15 receptor alpha chain (TGFRs).

[1285] CHO cells were co-transfected with 7t15 and TGFRs vectors. The 7t15-TGFRs complex was purified from the transfected CHO cell culture supernatant. The IL-7, IL-15, TGFβ receptor and tissue factor (TF) components were demonstrated in the complex by ELISA as shown in FIG. 124. A humanized anti-TF antibody monoclonal antibody (anti-TF antibody IgG1) was used as the capture antibody to determine TF in 7t15-TGFRs, and biotinylated antibodies against human IL-15 (R&D systems), human IL-7 (Biolegend), anti-TGFβ receptor (R&D Systems) were used as the detection antibodies to respectively determine IL-7, IL-15 and TGFβ receptor in 7t15-TGFRs. Peroxidase conjugated streptavidin (Jackson ImmunoResearch Lab) and ABTS substrate (Surmodics IVD, Inc.) were then used to detect the bound biotinylated antibodies. The results were analyzed by ELISA (FIG. 124).

In Vivo Characterization of 7t15-TGFRs in C57BL/6 Mice

[1286] To determine the immunostimulatory activity of 7t15-TGFRs in vivo, C57BL/6 mice were subcutaneously treated with control solution (PBS) or 7t15-TGFRs at 0.3, 1, 3 and 10 mg/kg. The treated mice were euthanized. The mouse spleens were collected and weighed day 4 post treatment. Single splenocyte suspensions were prepared and stained with fluorochrome-conjugated anti-CD4, anti-CD8, and anti-NK1.1 antibodies and the percentage of CD4⁺ T cells, CD8⁺ T cells, and NK cells was analyzed by flow cytometry. The results showed that 7t15-TGFRs was effective at expanding splenocytes based on spleen weight (FIG. 125A), especially at 1-10 mg/kg. The percentages of CD8⁺ T cells and NK cells were higher compared to control-treated mice (FIG. 125B) at all doses tested.

CD44 Expression of CD4⁺ and CD8⁺ T Cells

[1287] It has been known that IL-15 induces CD44 expression on T cells and development of memory T cells. CD44 expression of CD4⁺ and CD8⁺ T cells in the 7t15-TGFRs treated mice were assessed. C57BL/6 mice were subcutaneously treated with 7t15-TGFRs. The splenocytes were stained with fluorochrome-conjugated anti-CD4, anti-CD8 and anti-CD44 monoclonal antibodies for immunocyte subsets. The percentages of CD4⁺CD44^{high} T cells of total CD4+ T cells and CD8⁺CD44^{high} T cells of total CD8⁺ T cells were analyzed by flow cytometry. As shown in FIGS. 126A and 126B, 7t15-TGFRs significantly activated CD4⁺ and CD8⁺ T cells to differentiate into memory T cells.

[1288] Furthermore, the dynamic proliferation of immune cells based on Ki67 expression of splenocytes and cytotoxicity potential based on granzyme B expression of the splenocytes induced by 7t15-TGFRs after the single dose treatment of mouse were also evaluated. C57BL/6 mice were subcutaneously treated with 7t15-TGFRs at 3 mg/kg. The treated mice were euthanized and the splenocytes were prepared. The prepared splenocytes were stained with fluorochrome-conjugated anti-CD4, anti-CD8, and anti-NK1.1 (NK) antibodies for immunocyte subsets and then intracellularly stained with anti-Ki67 antibody for cell proliferation and anti-granzyme B antibody for cytotoxic marker. The mean fluorescent intensity (MFI) of Ki67 and granzyme B of corresponding immunocyte subsets was analyzed by flow cytometry. As shown in FIGS. 127A and 127B, in the spleens of mice treated with 7t15-TGFRs, the expression of Ki67 and granzyme B by CD8⁺ T cells and NK cells increased compared with PBS control treatment. These results demonstrate that 7t15-TGFRs is not only to increase numbers of CD8⁺ T cells and NK cells but also enhance potential cytotoxicity of these cells.

[1289] Additionally, cytotoxicity of the mouse splenocytes against tumor cells was also evaluated. Mouse Yac-1 cells were labeled with CellTrace Violet and used as tumor target cells. The splenocytes were prepared from 7t15-TGFRs-treated mice and used as effector cells. The target cells were mixed with effector cells at E:T ratio=10:1 in RPMI-10 medium with or without 7t15-TGFRs at 100 nM and incubated at 37° C. for 20 hours. Target Yac-1 cell inhibition was assessed by analysis of viable violet-labeled Yac-1 cells using flow cytometry. Percentage of Yac-1 inhibition was calculated using a formula, (1-viable Yac-1 cell number in experimental sample/viable Yac-1 cell number in the sample without splenocytes)×100. As shown in FIG. 128, 7t15-TGFRs-treated mouse splenocytes had stronger cytotoxicity against Yac-1 cells than the control mouse splenocytes and addition of 7t15-TGFRs during cytotoxic assay further enhanced cytotoxicity of splenocytes against Yac-1 target cells.

### Example 57: TGFRt15-21s137L Fusion Protein Generation and Characterization

[1290] A fusion protein complex was generated comprising IL-21/IL-15RαSu/CD137L and TGFβ Receptor II/TF/IL-15 fusion proteins (FIG. 129 and FIG. 130). The human TGFβ Receptor II (Ile24-Asp159), tissue factor 219, and IL-15 sequences were obtained from the UniProt website and DNA for these sequences was synthesized by Genewiz. Specifically, a construct was made linking two TGFβ Receptor II sequences with a G4S(3) linker to generate a single chain version of TGFβ Receptor II and then directly linking to the N-terminus coding region of tissue factor 219 followed by the N-terminus coding region of IL-15.

[1291] The nucleic acid sequence of the TGFRt15 construct (including signal peptide sequence) is as follows:

(Signal peptide)
ATGAAGTGGGTGACCTTCATCAGCCTGCTGTTCCTGTTCTCCAGCGCCTAC
TCC
(Human TGFβ Receptor II fragments)
ATCCCCCCCCATGTGCAAAAGAGCGTGAACAACGATATGATCGTGACCGAC
AACAACGGCGCCGTGAAGTTTCCCCAGCTCTGCAAGTTCTGCGATGTCAGG
TTCAGCACCTGCGATAATCAGAAGTCCTGCATGTCCAACTGCAGCATCACC
TCCATCTGCGAGAAGCCCCAAGAAGTGTGCGTGGCCGTGTGGCGGAAAAAT
GACGAGAACATCACCCTGGAGACCGTGTGTCACGACCCCAAGCTCCCTTAT
CACGACTTCATTCTGGAGGACGCTGCCTCCCCCAAATGCATCATGAAGGAG
AAGAAGAAGCCCGGAGAGACCTTCTTTATGTGTTCCTGTAGCAGCGACGAG
TGTAACGACAACATCATCTTCAGCGAAGAGTACAACACCAGCAACCCTGAT
GGAGGTGGCGGATCCGGAGGTGGAGGTTCTGGTGGAGGTGGGAGTATTCCT
CCCCACGTGCAGAAGAGCGTGAATAATGACATGATCGTGACCGATAACAAT
GGCGCCGTGAAATTTCCCCAGCTGTGCAAATTCTGCGATGTGAGGTTTTCC
ACCTGCGACAACCAGAAGTCCTGTATGAGCAACTGCTCCATCACCTCCATC
TGTGAGAAGCCTCAGGAGGTGTGCGTGGCTGTCTGGCGGAAGAATGACGAG
AATATCACCCTGGAAACCGTCTGCCACGATCCCAAGCTGCCCTACCACGAT
TTCATCCTGGAAGACGCCGCCAGCCCTAAGTGCATCATGAAAGAGAAAAAG
AAGCCTGGCGAGACCTTTTTCATGTGCTCCTGCAGCAGCGACGAATGCAAC
GACAATATCATCTTTAGCGAGGAATACAATACCAGCAACCCCGAC
(Human Tissue Factor 219)
AGCGGCACAACCAACACAGTCGCTGCCTATAACCTCACTTGGAAGAGCACC
AACTTCAAAACCATCCTCGAATGGGAACCCAAACCCGTTAACCAAGTTTAC
ACCGTGCAGATCAGCACCAAGTCCGGCGACTGGAAGTCCAAATGTTTCTAT
ACCACCGACACCGAGTGCGATCTCACCGATGAGATCGTGAAAGATGTGAAA
CAGACCTACCTCGCCCGGGTGTTTAGCTACCCCGCCGGCAATGTGGAGAGC
ACTGGTTCCGCTGGCGAGCCTTTATACGAGAACAGCCCCGAATTTACCCCT
TACCTCGAGACCAATTTAGGACAGCCCACCATCCAAAGCTTTGAGCAAGTT
GGCACAAAGGTGAATGTGACAGTGGAGGACGAGCGGACTTTAGTGCGGCGG
AACAACACCTTTCTCAGCCTCCGGGATGTGTTCGGCAAAGATTTAATCTAC
ACACTGTATTACTGGAAGTCCTCTTCCTCCGGCAAGAAGACAGCTAAAACC
AACACAAACGAGTTTTTAATCGACGTGGATAAAGGCGAAAACTACTGTTTC
AGCGTGCAAGCTGTGATCCCCTCCCGGACCGTGAATAGGAAAAGCACCGAT
AGCCCCGTTGAGTGCATGGGCCAAGAAAAGGGCGAGTTCCGGGAG
(Human IL-15)
AACTGGGTGAACGTCATCAGCGATTTAAAGAAGATCGAAGATTTAATTCAG
TCCATGCATATCGACGCCACTTTATACACAGAATCCGACGTGCACCCCTCT
TGTAAGGTGACCGCCATGAAATGTTTTTTACTGGAGCTGCAAGTTATCTCT
TTAGAGAGCGGAGACGCTAGCATCCACGACACCGTGGAGAATTTAATCATT
TTAGCCAATAACTCTTTATCCAGCAACGGCAACGTGACAGAGTCCGGCTGC
AAGGAGTGCGAAGAGCTGGAGGAGAAGAACATCAAGGAGTTTCTGCAATCC
TTTGTGCACATTGTCCAGATGTTCATCAATACCTCC

[1292] The amino acid sequence of TGFRt15 fusion protein (including the leader sequence) is as follows:

(Signal peptide)
MKWVTFISLLFLFSSAYS
(Human TGFβ Receptor II)
IPPHVQKSVNNDMIVTDNNGAVKFPQLCKFCDVRFSTCDNQKSCMSNCSIT
SICEKPQEVCVAVWRKNDENITLETVCHDPKLPYHDFILEDAASPKCIMKE
KKKPGETFFMCSCSSDECNDNIIFSEEYNTSNPDGGGGSGGGGSGGGGSIP
PHVQKSVNNDMIVTDNNGAVKFPQLCKFCDVRFSTCDNQKSCMSNCSITSI
CEKPQEVCVAVWRKNDENITLETVCHDPKLPYHDFILEDAASPKCIMKEKK
KPGETFFMCSCSSDECNDNIIFSEEYNTSNPD
(Human Tissue Factor 219)
SGTTNTVAAYNLTWKSTNFKTILEWEPKPVNQVYTVQISTKSGDWKSKCFY
TTDTECDLTDEIVKDVKQTYLARVFSYPAGNVESTGSAGEPLYENSPEFTP
YLETNLGQPTIQSFEQVGTKVNVTVEDERTLVRRNNTFLSLRDVFGKDLIY
TLYYWKSSSSGKKTAKTNTNEFLIDVDKGENYCFSVQAVIPSRTVNRKSTD
SPVECMGQEKGEFRE
(Human IL-15)
NWVNVISDLKKIEDLIQSMHIDATLYTESDVHPSCKVTAMKCFLLELQVIS
LESGDASIHDTVENLIILANNSLSSNGNVTESGCKECEELEEKNIKEFLQS
FVHIVQMFINTS

[1293] The nucleic acid and protein sequences of the 21s137L are shown below. The nucleic acid sequence of the 21s137L construct (including signal peptide sequence) is as follows:

(Signal peptide)
ATGAAGTGGGTGACCTTCATCAGCCTGCTGTTCCTGTTCTCCAGCGCCTAC
TCC
(Human IL-21)
CAGGGCCAGGACAGGCACATGATCCGGATGAGGCAGCTCATCGACATCGTC
GACCAGCTGAAGAACTACGTGAACGACCTGGTGCCCGAGTTTCTGCCTGCC
CCCGAGGACGTGGAGACCAACTGCGAGTGGTCCGCCTTCTCCTGCTTTCAG
AAGGCCCAGCTGAAGTCCGCCAACACCGGCAACAACGAGCGGATCATCAAC
GTGAGCATCAAGAAGCTGAAGCGGAAGCCTCCCTCCACAAACGCCGGCAGG
AGGCAGAAGCACAGGCTGACCTGCCCCAGCTGTGACTCCTACGAGAAGAAG
CCCCCCAAGGAGTTCCTGGAGAGGTTCAAGTCCCTGCTGCAGAAGATGATC
CATCAGCACCTGTCCTCCAGGACCCACGGCTCCGAGGACTCC
(Human IL-15R α sushi domain)
ATTACATGCCCCCCTCCCATGAGCGTGGAGCACGCCGACATCTGGGTGAAG
AGCTATAGCCTCTACAGCCGGGAGAGGTATATCTGTAACAGCGGCTTCAAG
AGGAAGGCCGGCACCAGCAGCCTCACCGAGTGCGTGCTGAATAAGGCTACC
AACGTGGCTCACTGGACAACACCCTCTTTAAAGTGCATCCGG
((G4S)3 linker)
GGCGGTGGAGGATCCGGAGGAGGTGGCTCCGGCGGCGGAGGATCT
(Human CD137L)
CGCGAGGGTCCCGAGCTTTCGCCCGACGATCCCGCCGGCCTCTTGGACCTG
CGGCAGGGCATGTTTGCGCAGCTGGTGGCCCAAAATGTTCTGCTGATCGAT
GGGCCCCTGAGCTGGTACAGTGACCCAGGCCTGGCAGGCGTGTCCCTGACG
GGGGGCCTGAGCTACAAAGAGGACACGAAGGAGCTGGTGGTGGCCAAGGCT
GGAGTCTACTATGTCTTCTTTCAACTAGAGCTGCGGCGCGTGGTGGCCGGC
GAGGGCTCAGGCTCCGTTTCACTTGCGCTGCACCTGCAGCCACTGCGCTCT
GCTGCTGGGGCCGCCGCCCTGGCTTTGACCGTGGACCTGCCACCCGCCTCC
TCCGAGGCTCGGAACTCGGCCTTCGGTTTCCAGGGCCGCTTGCTGCACCTG
AGTGCCGGCCAGCGCCTGGGCGTCCATCTTCACACTGAGGCCAGGGCACGC
CATGCCTGGCAGCTTACCCAGGGCGCCACAGTCTTGGGACTCTTCCGGGTG
ACCCCCGAAATCCCAGCCGGACTCCCTTCACCGAGGTCGGAA

[1294] The amino acid sequence of 21s137L fusion protein (including the leader sequence) is as follows:

(Signal peptide)
MKWVTFISLLFLFSSAYS
(Human IL-21)
[sequence omitted]
(Human IL-15R a sushi domain)
ITCPPPMSVEHADIWVKSYSLYSRERYICNSGFKRKAGTSSLTECVLNKA
TNVAHWTTPSLKCIR
((G4S)3 linker)
GGGGSGGGGSGGGGS
(Human CD137L)
REGPELSPDDPAGLLDLRQGMFAQLVAQNVLLIDGPLSWYSDPGLAGVS
LTGGLSYKEDTKELVVAKAGVYYVFFQLELRRVVAGEGSGSVSLALHLQ
PLRSAAGAAALALTVDLPPASSEARNSAFGFQGRLLHLSAGQRLGVHLH
TEARARHAWQLTQGATVLGLFRVTPEIPAGLPSPRSE

[1295] In some cases, the leader peptide is cleaved from the intact polypeptide to generate the mature form that may be soluble or secreted.

[1296] The IL-21/IL-15RαSu/CD137L and TGFR/TF/IL-15 constructs were cloned into a modified retrovirus expression vectors as described previously (Hughes M S, Yu Y Y, Dudley M E, Zheng Z, Robbins P F, Li Y, et al. Transfer of a TCR gene derived from a patient with a marked antitumor response conveys highly active T-cell effector functions. Hum Gene Ther 2005; 16:457-72), and the expression vectors were transfected into CHO-K1 cells. Co-expression of the two constructs in CHO-K1 cells allowed for formation and secretion of the soluble TGFR/TF/IL-15: IL-21/IL-15RαSu/CD137L protein complex (referred to as TGFRt15-21s137L), which can be purified by anti-TF antibody IgG1 affinity and other chromatography methods.

### Purification Elution Chromatograph of TGFRt15-21s137L Using Anti-TF Antibody Affinity Column

[1297] TGFRt15-21s137L harvest from cell culture was loaded onto the anti-TF antibody affinity column equilibrated with 5 column volumes of PBS. After sample loading, the column was washed with 5 column volumes of PBS, followed by elution with 6 column volumes of 0.1M acetic acid (pH 2.9). A280 elution peak was collected and then neutralized to pH 7.5-8.0 with 1M Tris base. The neutralized sample was then buffer exchanged into PBS using Amicon centrifugal filters with a 30 KDa molecular weight cutoff. As shown in FIG. 131, the anti-TF antibody affinity column bound to TGFRt15-21s137L which contains TF as a fusion partner of TGFRt15-21s137L. The buffer-exchanged protein sample was stored at 2-8° C. for further biochemical analyses and biological activity tests. After each elution, the anti-TF antibody affinity column was stripped using 6 column volumes of 0.1M glycine (pH 2.5). The column was then neutralized using 5 column volumes of PBS, and 7 column volumes of 20% ethanol for storage. The anti-TF antibody affinity column was connected to a GE Healthcare AKTA Avant system. The flow rate was 4 mL/min for all steps except for the elution step, which was 2 mL/min.

### Example 58: TGFRt15-TGFRs21 Fusion Protein Generation and Characterization

[1298] A fusion protein complex was generated comprising of TGFβ Receptor II/IL-15RαSu/IL-21 and TGFβ Receptor II/TF/IL-15 fusion proteins (FIG. 132 and FIG. 133). The human TGFβ Receptor II (Ile24-Asp159), tissue factor 219, IL-21, and IL-15 sequences were obtained from the UniProt website and DNA for these sequences was synthesized by Genewiz. Specifically, a construct was made linking two TGFβ Receptor II sequences with a G4S(3) linker to generate a single chain version of TGFβ Receptor II and then directly linking to the N-terminus coding region of tissue factor 219 followed by the N-terminus coding region of IL-15.

[1299] The nucleic acid and protein sequences of a construct comprising two TGFβ Receptor II linked to the N-terminus of tissue factor 219 following with the N-terminus of IL-15 are shown below.

[1300] The nucleic acid sequence of the TGFRt15 construct (including signal peptide sequence) is as follows:

(Signal peptide)
ATGAAGTGGGTGACCTTCATCAGCCTGCTGTTCCTGTTCTCCAGCGCCT
ACTCC
(Human TGFβ Receptor II fragments)
ATCCCCCCCCATGTGCAAAAGAGCGTGAACAACGATATGATCGTGACC
GACAACAACGGCGCCGTGAAGTTTCCCCAGCTCTGCAAGTTCTGCGAT
GTCAGGTTCAGCACCTGCGATAATCAGAAGTCCTGCATGTCCAACTGC
AGCATCACCTCCATCTGCGAGAAGCCCCAAGAAGTGTGCGTGGCCGTG
TGGCGGAAAAATGACGAGAACATCACCCTGGAGACCGTGTGTCACGAC
CCCAAGCTCCCTTATCACGACTTCATTCTGGAGGACGCTGCCTCCCCC
AAATGCATCATGAAGGAGAAGAAGAAGCCCGGAGAGACCTTCTTTATG
TGTTCCTGTAGCAGCGACGAGTGTAACGACAACATCATCTTCAGCGAA
GAGTACAACACCAGCAACCCTGATGGAGGTGGCGGATCCGGAGGTGGA
GGTTCTGGTGGAGGTGGGAGTATTCCTCCCCACGTGCAGAAGAGCGTG
AATAATGACATGATCGTGACCGATAACAATGGCGCCGTGAAATTTCCC
CAGCTGTGCAAATTCTGCGATGTGAGGTTTTCCACCTGCGACAACCAG
AAGTCCTGTATGAGCAACTGCTCCATCACCTCCATCTGTGAGAAGCCT
CAGGAGGTGTGCGTGGCTGTCTGGCGGAAGAATGACGAGAATATCACC
CTGGAAACCGTCTGCCACGATCCCAAGCTGCCCTACCACGATTTCATC
CTGGAAGACGCCGCCAGCCCTAAGTGCATCATGAAAGAGAAAAAGAAG
CCTGGCGAGACCTTTTTCATGTGCTCCTGCAGCAGCGACGAATGCAAC
GACAATATCATCTTTAGCGAGGAATACAATACCAGCAACCCCGAC
(Human Tissue Factor 219)
AGCGGCACAACCAACACAGTCGCTGCCTATAACCTCACTTGGAAGAGC
ACCAACTTCAAAACCATCCTCGAATGGGAACCCAAACCCGTTAACCAA
GTTTACACCGTGCAGATCAGCACCAAGTCCGGCGACTGGAAGTCCAAA
TGTTTCTATACCACCGACACCGAGTGCGATCTCACCGATGAGATCGTG
AAAGATGTGAAACAGACCTACCTCGCCCGGGTGTTTAGCTACCCCGCC
GGCAATGTGGAGAGCACTGGTTCCGCTGGCGAGCCTTTATACGAGAAC
AGCCCCGAATTTACCCCTTACCTCGAGACCAATTTAGGACAGCCCACC
ATCCAAAGCTTTGAGCAAGTTGGCACAAAGGTGAATGTGACAGTGGAG
GACGAGCGGACTTTAGTGCGGCGGAACAACACCTTTCTCAGCCTCCGG
GATGTGTTCGGCAAAGATTTAATCTACACACTGTATTACTGGAAGTCC
TCTTCCTCCGGCAAGAAGACAGCTAAAACCAACACAAACGAGTTTTTA
ATCGACGTGGATAAAGGCGAAAACTACTGTTTCAGCGTGCAAGCTGTG
ATCCCCTCCCGGACCGTGAATAGGAAAAGCACCGATAGCCCCGTTGAG
TGCATGGGCCAAGAAAAGGGCGAGTTCCGGGAG
(Human IL-15)
AACTGGGTGAACGTCATCAGCGATTTAAAGAAGATCGAAGATTTAATT
CAGTCCATGCATATCGACGCCACTTTATACACAGAATCCGACGTGCAC
CCCTCTTGTAAGGTGACCGCCATGAAATGTTTTTTACTGGAGCTGCAA
GTTATCTCTTTAGAGAGCGGAGACGCTAGCATCCACGACACCGTGGAG
AATTTAATCATTTTAGCCAATAACTCTTTATCCAGCAACGGCAACGTG
ACAGAGTCCGGCTGCAAGGAGTGCGAAGAGCTGGAGGAGAAGAACATC
CAAGGAGTTTCTGCAATCCTTTGTGACATTGTCCAGATGTTCATCAAT
ACCTCC

[1301] The amino acid sequence of TGFRt15 fusion protein (including the leader sequence) is as follows:

(Signal peptide)
MKWVTFISLLFLFSSAYS
(Human TGFβ Receptor II)
IPPHVQKSVNNDMIVTDNNGAVKFPQLCKFCDVRFSTCDNQKSCMSNCSI
TSICEKPQEVCVAVWRKNDENITLETVCHDPKLPYHDFILEDAASPKCIM
KEKKKPGETFFMCSCSSDECNDNIIFSEEYNTSNPDGGGGSGGGGSGGGG
SIPPHVQKSVNNDMIVTDNNGAVKFPQLCKFCDVRFSTCDNQKSCMSNCS
ITSICEKPQEVCVAVWRKNDENITLETVCHDPKLPYHDFILEDAASPKCI
MKEKKKPGETFFMCSCSSDECNDNIIFSEEYNTSNPD
(Human Tissue Factor 219)
SGTTNTVAAYNLTWKSTNFKTILEWEPKPVNQVYTVQISTKSGDWKSKC
FYTTDTECDLTDEIVKDVKQTYLARVFSYPAGNVESTGSAGEPLYENSPE
FTPYLETNLGQPTIQSFEQVGTKVNVTVEDERTLVRRNNTFLSLRDVFGK
DLIYTLYYWKSSSSGKKTAKTNTNEFLIDVDKGENYCFSVQAVIPSRTVN
RKSTDSPVECMGQEKGEFRE
(Human IL-15)
NWVNVISDLKKIEDLIQSMHIDATLYTESDVHPSCKVTAMKCFLLELQVI
SLESGDASIHDTVENLIILANNSLSSNGNVTESGCKECEELEEKNIKEFL
QSFVHIVQMFINTS

[1302] Constructs were also made by attaching two TGFβ Receptor II directly to the IL-15RαSu chain, followed by the N-terminus coding region of IL-21, which was synthesized by Genewiz. The nucleic acid and protein sequences of a construct comprising the TGFβ Receptor II linked to the N-terminus of IL-15RαSu following with the N-terminus of IL-21 are shown below.

[1303] The nucleic acid sequence of the TGFRs21 construct (including signal peptide sequence) is as follows:

(Signal peptide)
ATGAAGTGGGTGACCTTCATCAGCCTGCTGTTCCTGTTCTCCAGCGCCT
ACTCC
(Human TGFβ Receptor II fragments)
ATCCCCCCCCATGTGCAAAAGAGCGTGAACAACGATATGATCGTGACC
GACAACAACGGCGCCGTGAAGTTTCCCCAGCTCTGCAAGTTCTGCGAT
GTCAGGTTCAGCACCTGCGATAATCAGAAGTCCTGCATGTCCAACTGC
AGCATCACCTCCATCTGCGAGAAGCCCCAAGAAGTGTGCGTGGCCGTG
TGGCGGAAAAATGACGAGAACATCACCCTGGAGACCGTGTGTCACGAC
CCCAAGCTCCCTTATCACGACTTCATTCTGGAGGACGCTGCCTCCCCC
AAATGCATCATGAAGGAGAAGAAGAAGCCCGGAGAGACCTTCTTTATG
TGTTCCTGTAGCAGCGACGAGTGTAACGACAACATCATCTTCAGCGAA
GAGTACAACACCAGCAACCCTGATGGAGGTGGCGGATCCGGAGGTGGA
GGTTCTGGTGGAGGTGGGAGTATTCCTCCCCACGTGCAGAAGAGCGTG
AATAATGACATGATCGTGACCGATAACAATGGCGCCGTGAAATTTCCC
CAGCTGTGCAAATTCTGCGATGTGAGGTTTTCCACCTGCGACAACCAG
AAGTCCTGTATGAGCAACTGCTCCATCACCTCCATCTGTGAGAAGCCT
CAGGAGGTGTGCGTGGCTGTCTGGCGGAAGAATGACGAGAATATCACC
CTGGAAACCGTCTGCCACGATCCCAAGCTGCCCTACCACGATTTCATC
CTGGAAGACGCCGCCAGCCCTAAGTGCATCATGAAAGAGAAAAAGAAG
CCTGGCGAGACCTTTTTCATGTGCTCCTGCAGCAGCGACGAATGCAAC
GACAATATCATCTTTAGCGAGGAATACAATACCAGCAACCCCGAC
(Human IL-15R a sushi domain)
ATTACATGCCCCCCTCCCATGAGCGTGGAGCACGCCGACATCTGGGTG
AAGAGCTATAGCCTCTACAGCCGGGAGAGGTATATCTGTAACAGCGGC
TTCAAGAGGAAGGCCGGCACCAGCAGCCTCACCGAGTGCGTGCTGAAT
AAGGCTACCAACGTGGCTCACTGGACAACACCCTCTTTAAAGTGCATC
CGG
(Human IL-21)
CAGGGCCAGGACAGGCACATGATCCGGATGAGGCAGCTCATCGACATC
GTCGACCAGCTGAAGAACTACGTGAACGACCTGGTGCCCGAGTTTCTG
CCTGCCCCCGAGGACGTGGAGACCAACTGCGAGTGGTCCGCCTTCTCC
TGCTTTCAGAAGGCCCAGCTGAAGTCCGCCAACACCGGCAACAACGAG
CGGATCATCAACGTGAGCATCAAGAAGCTGAAGCGGAAGCCTCCCTCC
ACAAACGCCGGCAGGAGGCAGAAGCACAGGCTGACCTGCCCCAGCTGT
GACTCCTACGAGAAGAAGCCCCCCAAGGAGTTCCTGGAGAGGTTCAAG
TCCCTGCTGCAGAAGATGATCCATCAGCACCTGTCCTCCAGGACCCAC
GGCTCCGAGGACTCC

[1304] The amino acid sequence of TGFRs21 fusion protein (including the leader sequence) is as follows:

(Signal peptide)
MKWVTFISLLFLFSSAYS
(Human TGFβ Receptor II)
IPPHVQKSVNNDMIVTDNNGAVKFPQLCKFCDVRFSTCDNQKSCMSNCSI
TSICEKPQEVCVAVWRKNDENITLETVCHDPKLPYHDFILEDAASPKCIMK
EKKKPGETFFMCSCSSDECNDNIIFSEEYNTSNPDGGGGSGGGGSGGGGSI
PPHVQKSVNNDMIVTDNNGAVKFPQLCKFCDVRFSTCDNQKSCMSNCSITS
ICEKPQEVCVAVWRKNDENITLETVCHDPKLPYHDFILEDAASPKCIMKEK
KKPGETFFMCSCSSDECNDNIIFSEEYNTSNPD
(Human IL-15R a sushi domain)
ITCPPPMSVEHADIWVKSYSLYSRERYICNSGFKRKAGTSSLTECVLNKAT
NVAHWTTPSLKCIR
(Human IL-21)
[sequence omitted]

[1305] In some cases, the leader peptide is cleaved from the intact polypeptide to generate the mature form that may be soluble or secreted.

[1306] The TGFR/IL-15RαSu/IL-21 and TGFR/TF/IL-15 constructs were cloned into a modified retrovirus expression vectors as described previously (Hughes M S, Yu Y Y, Dudley M E, Zheng Z, Robbins P F, Li Y, et al. Transfer of a TCR gene derived from a patient with a marked antitumor response conveys highly active T-cell effector functions. Hum Gene Ther 2005; 16:457-72), and the expression vectors were transfected into CHO-K1 cells. Co-expression of the two constructs in CHO-K1 cells allowed for formation and secretion of the soluble TGFR/TF/IL-15:TGFR/IL-15RαSu/IL-21 protein complex (referred to as TGFRt15-TGFRs21), which can be purified by anti-TF antibody IgG1 affinity and other chromatography methods.

### Purification Elution Chromatograph of TGFRt15-TGFRs21 Using Anti-TF Antibody Affinity Column

[1307] TGFRt15-TGFRs21 harvested from cell culture was loaded onto the anti-TF antibody affinity column equilibrated with 5 column volumes of PBS. After sample loading, the column was washed with 5 column volumes of PBS, followed by elution with 6 column volumes of 0.1M acetic acid (pH 2.9). A280 elution peak was collected and then neutralized to pH 7.5-8.0 with 1M Tris base. The neutralized sample was then buffer exchanged into PBS using Amicon centrifugal filters with a 30 KDa molecular weight cutoff. As shown in FIG. 134, the anti-TF antibody affinity column bound to TGFRt15-TGFRs21 which contains TF as a fusion partner. The buffer-exchanged protein sample was stored at 2-8° C. for further biochemical analyses and biological activity tests. After each elution, the anti-TF antibody affinity column was stripped using 6 column volumes of 0.1M glycine (pH 2.5). The column was then neutralized using 5 column volumes of PBS, and 7 column volumes of 20% ethanol for storage. The anti-TF antibody affinity column was connected to a GE Healthcare AKTA Avant system. The flow rate was 4 mL/min for all steps except for the elution step, which was 2 mL/min.

### Reduced SDS PAGE Analysis of TGFRt15-TGFRs21

[1308] To determine the purity and molecular weight of the protein, TGFRt15-TGFRs21 protein sample purified with anti-TF antibody affinity column was analyzed by sodium dodecyl sulfate polyacrylamide gel (4-12% NuPage Bis-Tris gel) electrophoresis (SDS-PAGE) method under reduced condition. After electrophoresis, the gel was stained with InstantBlue for about 30 min, followed by destaining overnight in purified water.

[1309] To verify that the TGFRt15-TGFRs21 protein undergoes glycosylation after translation in CHO cells, a deglycosylation experiment was conducted using the Protein Deglycosylation Mix II kit from New England Biolabs and the manufacturer's instructions. FIG. 135 shows the reduced SDS-PAGE analysis of the sample in non-deglycosylated (lane 1 in red outline) and deglycosylated (lane 2 in yellow outline) state. It is clear that the protein is glycosylated when it is expressed in CHO cells. After deglycosylation, the purified sample showed expected molecular weights (69 kDa and 55 kDa) in reduced SDS gel. Lane M was loaded with 10 ul of SeeBlue Plus2 Prestained Standard.

### Immunostimulation of TGFRt15-TGFRs21 in C57BL/6 Mice

[1310] TGFRt15-TGFRs21 is a multi-chain polypeptide (a type A multi-chain polypeptide described herein) that includes the first polypeptide that is a soluble fusion of single chain two TGFβRII domains, human tissue factor 219 fragment and human IL-15 (TGFRt15), and the second polypeptide that is a soluble fusion of single chain two TGFβRII domains, sushi domain of human IL-15 receptor alpha chain and human IL-21 (TGFRs21).

[1311] CHO cells were co-transfected with TGFRt15 and TGFRs21 vectors. The TGFRt15-TGFRs21 complex was purified from the transfected CHO cell culture supernatant. The TGFβ receptor, IL-15, IL-21 and tissue factor (TF) components were demonstrated in the complex by ELISA as shown in FIG. 136. A humanized anti-TF monoclonal antibody (anti-TF IgG1) was used as the capture antibody to determine TF in TGFRt15-TGFRs21, biotinylated anti-human IL-15 antibody (R&D systems), biotinylated anti-human TGFβ receptor antibody (R&D systems, and biotinylated anti-human IL-21 antibody (R&D Systems) were used as the detection antibodies to respectively determine IL-15, TGFβ receptor, and IL-21 in TGFRt15-TGFRs21. For detection, peroxidase conjugated streptavidin (Jackson ImmunoResearch Lab) and ABTS were used.

[1312] Wild type C57BL/6 mice were treated subcutaneously with either control solution (PBS) or with TGFRt15-TGFRs21 at 3 mg/kg. Four days after treatment, spleen weight and the percentages of various immune cell types present in the spleen were evaluated. As shown in FIG. 137A, the percentages of CD4⁺ T cells, CD8⁺ T cells, and NK cells present in the spleen of control-treated and TGFRt15-TGFRs21-treated mice were evaluated. The dynamic proliferation of immune cells based on Ki67 expression after TGFRt15-TGFRs21 treatment was also evaluated. The splenocytes were stained with fluorochrome-conjugated anti-CD4, anti-CD8, and anti-NK1.1 (NK) antibodies and then intracellularly stained with anti-Ki67 antibody. The percentage of CD4⁺ T cells, CD8⁺ T cells, and NK cells and the mean fluorescent intensity (MFI) of Ki67 of corresponding immunocyte subsets were analyzed by flow cytometry (FIGS. 137A and 137B). Furthermore, cytotoxicity potential based on granzyme B expression of the splenocytes induced by TGFRt15-TGFRs21 after the single dose treatment of mouse was also evaluated. As shown in FIG. 138, in the spleens of mice treated with TGFRt15-TGFRs21, the expression of granzyme B by NK cells increased after treatment. The splenocytes from TGFRt15-TGFRs21-treated mice were stained with fluorochrome-conjugated anti-CD4, anti-CD8, and anti-NK1.1 (NK) antibodies and then intracellularly stained with anti-granzyme B antibody. The mean fluorescent intensity (MFI) of granzyme B of corresponding immunocyte subsets was analyzed by flow cytometry (FIG. 138).

[1313] As shown in FIG. 137A, in the spleens of mice treated with TGFRt15-TGFRs21, the percentages of CD8⁺ T cells and NK cells both increased on day 4 after a single TGFRt15-TGFRs21 treatment. These results demonstrate that TGFRt15-TGFRs21 is able to induce immune cells to proliferate in mouse spleen, in particular CD8⁺ T cells and NK cells.

[1314] Additionally, cytotoxicity of the mouse splenocytes against tumor cells was also evaluated. Mouse Yac-1 cells were labeled with CellTrace Violet and used as tumor target cells. The splenocytes were prepared from TGFRt15-TGFRs21-treated mice and used as effector cells. The target cells were mixed with effector cells at E:T ratio=10:1 in RPMI-10 medium with or without TGFRt15-TGFRs21 at 100 nM and incubated at 37° C. for 24 hours. Target Yac-1 cell inhibition was assessed by analysis of viable violet-labeled Yac-1 cells using flow cytometry. Percentage of Yac-1 inhibition was calculated using a formula, (1-[viable Yac-1 cell number in experimental sample]/[viable Yac-1 cell number in the sample without splenocytes])×100. As shown in FIG. 139, TGFRt15-TGFRs21-treated mouse splenocytes had stronger cytotoxicity against Yac-1 cells than the control mouse cells in the presence of TGFRt15-TGFRs21 during cytotoxic assay (FIG. 139).

### Example 59: TGFRt15-TGFRs16 Fusion Protein Generation

[1315] A fusion protein complex was generated comprising of TGFβ Receptor II/IL-15RαSu/anti-CD16scFv and TGFβ Receptor II/TF/IL-15 fusion proteins (FIG. 140 and FIG. 141). The human TGFβ Receptor II (Ile24-Asp159), tissue factor 219, and IL-15 sequences were obtained from the UniProt website and DNA for these sequences was synthesized by Genewiz. Specifically, a construct was made linking two TGFβ Receptor II sequences with a G4S(3) linker to generate a single chain version of TGFβ Receptor II and then directly linking to the N-terminus coding region of tissue factor 219 followed by the N-terminus coding region of IL-15.

[1316] The nucleic acid and protein sequences of a construct comprising two TGFβ Receptor II linked to the N-terminus of tissue factor 219 following with the N-terminus of IL-15 are shown below.

[1317] The nucleic acid sequence of the TGFRt15 construct (including signal peptide sequence) is as follows:

(Signal peptide)
ATGAAGTGGGTGACCTTCATCAGCCTGCTGTTCCTGTTCTCCAGCGCCT
ACTCC
(Human TGFβ Receptor II fragments)
ATCCCCCCCCATGTGCAAAAGAGCGTGAACAACGATATGATCGTGACCGA
CAACAACGGCGCCGTGAAGTTTCCCCAGCTCTGCAAGTTCTGCGATGTCA
GGTTCAGCACCTGCGATAATCAGAAGTCCTGCATGTCCAACTGCAGCATC
ACTCCATCTGCGAGAAGCCCCAAGAAGTGTGCGTGGCCGTGTGGCGGAAA
AATGACGAGAACATCACCCTGGAGACCGTGTGTCACGACCCCAAGCTCCC
TTATCACGACTTCATTCTGGAGGACGCTGCCTCCCCCAAATGCATCATGA
AGGAGAAGAAGAAGCCCGGAGAGACCTTCTTTATGTGTTCCTGTAGCAGC
GACGAGTGTAACGACAACATCATCTTCAGCGAAGAGTACAACACCAGCAA
CCCTGATGGAGGTGGCGGATCCGGAGGTGGAGGTTCTGGTGGAGGTGGGA
GTATTCCTCCCCACGTGCAGAAGAGCGTGAATAATGACATGATCGTGACC
GATAACAATGGCGCCGTGAAATTTCCCCAGCTGTGCAAATTCTGCGATGT
GAGGTTTTCCACCTGCGACAACCAGAAGTCCTGTATGAGCAACTGCTCCA
TCACCTCCATCTGTGAGAAGCCTCAGGAGGTGTGCGTGGCTGTCTGGCGG
AAGAATGACGAGAATATCACCCTGGAAACCGTCTGCCACGATCCCAAGCT
GCCCTACCACGATTTCATCCTGGAAGACGCCGCCAGCCCTAAGTGCATCA
TGAAAGAGAAAAAGAAGCCTGGCGAGACCTTTTTCATGTGCTCCTGCAGC
AGCGACGAATGCAACGACAATATCATCTTTAGCGAGGAATACAATACCAG
CAACCCCGAC
(Human Tissue Factor 219)
AGCGGCACAACCAACACAGTCGCTGCCTATAACCTCACTTGGAAGAGCAC
CAACTTCAAAACCATCCTCGAATGGGAACCCAAACCCGTTAACCAAGTTT
ACACCGTGCAGATCAGCACCAAGTCCGGCGACTGGAAGTCCAAATGTTTC
TATACCACCGACACCGAGTGCGATCTCACCGATGAGATCGTGAAAGATGT
GAAACAGACCTACCTCGCCCGGGTGTTTAGCTACCCCGCCGGCAATGTGG
AGAGCACTGGTTCCGCTGGCGAGCCTTTATACGAGAACAGCCCCGAATTT
ACCCCTTACCTCGAGACCAATTTAGGACAGCCCACCATCCAAAGCTTTGA
GCAAGTTGGCACAAAGGTGAATGTGACAGTGGAGGACGAGCGGACTTTAG
TGCGGCGGAACAACACCTTTCTCAGCCTCCGGGATGTGTTCGGCAAAGAT
TTAATCTACACACTGTATTACTGGAAGTCCTCTTCCTCCGGCAAGAAGAC
AGCTAAAACCAACACAAACGAGTTTTTAATCGACGTGGATAAAGGCGAAA
ACTACTGTTTCAGCGTGCAAGCTGTGATCCCCTCCCGGACCGTGAATAGG
AAAAGCACCGATAGCCCCGTTGAGTGCATGGGCCAAGAAAAGGGCGAGTT
CCGGGAG
(Human IL-15)
AACTGGGTGAACGTCATCAGCGATTTAAAGAAGATCGAAGATTTAATTCA
GTCCATGCATATCGACGCCACTTTATACACAGAATCCGACGTGCACCCCT
CTTGTAAGGTGACCGCCATGAAATGTTTTTTACTGGAGCTGCAAGTTATC
TCTTTAGAGAGCGGAGACGCTAGCATCCACGACACCGTGGAGAATTTAAT
CATTTTAGCCAATAACTCTTTATCCAGCAACGGCAACGTGACAGAGTCCG
GCTGCAAGGAGTGCGAAGAGCTGGAGGAGAAGAACATCAAGGAGTTTCTG
CAATCCTTTGTGCACATTGTCCAGATGTTCATCAATACCTCC

[1318] The amino acid sequence of TGFRt15 fusion protein (including the leader sequence) is as follows:

(Signal peptide)
MKWVTFISLLFLFSSAYS
(Human TGFβ Receptor II)
IPPHVQKSVNNDMIVTDNNGAVKFPQLCKFCDVRFSTCDNQKSCMSNCSI
TSICEKPQEVCVAVWRKNDENITLETVCHDPKLPYHDFILEDAASPKCIM
KEKKKPGETFFMCSCSSDECNDNIIFSEEYNTSNPDGGGGSGGGGSGGGG
SIPPHVQKSVNNDMIVTDNNGAVKFPQLCKFCDVRFSTCDNQKSCMSNCS
ITSICEKPQEVCVAVWRKNDENITLETVCHDPKLPYHDFILEDAASPKCI
MKEKKKPGETFFMCSCSSDECNDNIIFSEEYNTSNPD
(Human Tissue Factor 219)
SGTTNTVAAYNLTWKSTNFKTILEWEPKPVNQVYTVQISTKSGDWKSKCF
YTTDTECDLTDEIVKDVKQTYLARVFSYPAGNVESTGSAGEPLYENSPEF
TPYLETNLGQPTIQSFEQVGTKVNVTVEDERTLVRRNNTFLSLRDVFGKD
LIYTLYYWKSSSSGKKTAKTNTNEFLIDVDKGENYCFSVQAVIPSRTVNR
KSTDSPVECMGQEKGEFRE
(Human IL-15)
NWVNVISDLKKIEDLIQSMHIDATLYTESDVHPSCKVTAMKCFLLELQVI
SLESGDASIHDTVENLIILANNSLSSNGNVTESGCKECEELEEKNIKEFL
QSFVHIVQMFINTS

[1319] Constructs were also made by attaching two TGFβ Receptor II directly to the IL-15RαSu chain, followed by the anti-CD16scFv sequence, which was synthesized by Genewiz. The nucleic acid and protein sequences of a construct comprising the TGFβ Receptor II linked to the N-terminus of IL-15RαSu following with the anti-CD16scFv sequence are shown below.

[1320] The nucleic acid sequence of the TGFRs16 construct (including signal peptide sequence) is as follows:

(Signal peptide)
ATGAAGTGGGTGACCTTCATCAGCCTGCTGTTCCTGTTCTCCAGCGCCTA
CTCC
(Human TGFβ Receptor II fragments)
ATCCCCCCCCATGTGCAAAAGAGCGTGAACAACGATATGATCGTGACCGA
CAACAACGGCGCCGTGAAGTTTCCCCAGCTCTGCAAGTTCTGCGATGTCA
GGTTCAGCACCTGCGATAATCAGAAGTCCTGCATGTCCAACTGCAGCATC
ACCTCCATCTGCGAGAAGCCCCAAGAAGTGTGCGTGGCCGTGTGGCGGAA
AAATGACGAGAACATCACCCTGGAGACCGTGTGTCACGACCCCAAGCTCC
CTTATCACGACTTCATTCTGGAGGACGCTGCCTCCCCCAAATGCATCATG
AAGGAGAAGAAGAAGCCCGGAGAGACCTTCTTTATGTGTTCCTGTAGCAG
CGACGAGTGTAACGACAACATCATCTTCAGCGAAGAGTACAACACCAGCA
ACCCTGATGGAGGTGGCGGATCCGGAGGTGGAGGTTCTGGTGGAGGTGGG
AGTATTCCTCCCCACGTGCAGAAGAGCGTGAATAATGACATGATCGTGAC
CGATAACAATGGCGCCGTGAAATTTCCCCAGCTGTGCAAATTCTGCGATG
TGAGGTTTTCCACCTGCGACAACCAGAAGTCCTGTATGAGCAACTGCTCC
ATCACCTCCATCTGTGAGAAGCCTCAGGAGGTGTGCGTGGCTGTCTGGCG
GAAGAATGACGAGAATATCACCCTGGAAACCGTCTGCCACGATCCCAAGC
TGCCCTACCACGATTTCATCCTGGAAGACGCCGCCAGCCCTAAGTGCATC
ATGAAAGAGAAAAAGAAGCCTGGCGAGACCTTTTTCATGTGCTCCTGCAG
CAGCGACGAATGCAACGACAATATCATCTTTAGCGAGGAATACAATACCA
GCAACCCCGAC
(Human IL-15R a sushi domain)
ATTACATGCCCCCCTCCCATGAGCGTGGAGCACGCCGACATCTGGGTGAA
GAGCTATAGCCTCTACAGCCGGGAGAGGTATATCTGTAACAGCGGCTTCA
AGAGGAAGGCCGGCACCAGCAGCCTCACCGAGTGCGTGCTGAATAAGGCT
ACCAACGTGGCTCACTGGACAACACCCTCTTTAAAGTGCATCCGG
(Anti-human CD 16scFv)
TCCGAGCTGACCCAGGACCCTGCTGTGTCCGTGGCTCTGGGCCAGACCGT
GAGGATCACCTGCCAGGGCGACTCCCTGAGGTCCTACTACGCCTCCTGGT
ACCAGCAGAAGCCCGGCCAGGCTCCTGTGCTGGTGATCTACGGCAAGAAC
AACAGGCCCTCCGGCATCCCTGACAGGTTCTCCGGATCCTCCTCCGGCAA
CACCGCCTCCCTGACCATCACAGGCGCTCAGGCCGAGGACGAGGCTGACT
ACTACTGCAACTCCAGGGACTCCTCCGGCAACCATGTGGTGTTCGGCGGC
GGCACCAAGCTGACCGTGGGCCATGGCGGCGGCGGCTCCGGAGGCGGCGG
CAGCGGCGGAGGAGGATCCGAGGTGCAGCTGGTGGAGTCCGGAGGAGGAG
TGGTGAGGCCTGGAGGCTCCCTGAGGCTGAGCTGTGCTGCCTCCGGCTTC
ACCTTCGACGACTACGGCATGTCCTGGGTGAGGCAGGCTCCTGGAAAGGG
CCTGGAGTGGGTGTCCGGCATCAACTGGAACGGCGGATCCACCGGCTACG
CCGATTCCGTGAAGGGCAGGTTCACCATCAGCAGGGACAACGCCAAGAAC
TCCCTGTACCTGCAGATGAACTCCCTGAGGGCCGAGGACACCGCCGTGTA
CTACTGCGCCAGGGGCAGGTCCCTGCTGTTCGACTACTGGGGACAGGGCA
CCCTGGTGACCGTGTCCAGG

[1321] The amino acid sequence of TGFRs16 fusion protein (including the leader sequence) is as follows:

(Signal peptide)
MKWVTFISLLFLFSSAYS
(Human TGFβ Receptor II)
IPPHVQKSVNNDMIVTDNNGAVKFPQLCKFCDVRFSTCDNQKSCMSNCSI
TSICEKPQEVCVAVWRKNDENITLETVCHDPKLPYHDFILEDAASPKCIM
KEKKKPGETFFMCSCSSDECNDNIIFSEEYNTSNPDGGGGSGGGGSGGGG
SIPPHVQKSVNNDMIVTDNNGAVKFPQLCKFCDVRFSTCDNQKSCMSNCS
ITSICEKPQEVCVAVWRKNDENITLETVCHDPKLPYHDFILEDAASPKCI
MKEKKKPGETFFMCSCSSDECNDNIIFSEEYNTSNPD
(Human IL-15R a sushi domain)
ITCPPPMSVEHADIWVKSYSLYSRERYICNSGFKRKAGTSSLTECVLNKAT
NVAHWTTPSLKCIR
(Anti-human CD 16scFv)
SELTQDPAVSVALGQTVRITCQGDSLRSYYASWYQQKPGQAPVLVIYGKNN
RPSGIPDRFSGSSSGNTASLTITGAQAEDEADYYCNSRDSSGNHVVFGGGT
KLTVGHGGGGSGGGGSGGGGSEVQLVESGGGVVRPGGSLRLSCAASGFTFD
DYGMSWVRQAPGKGLEWVSGINWNGGSTGYADSVKGRFTISRDNAKNSLYL
QMNSLRAEDTAVYYCARGRSLLFDYWGQGTLVTVSR

[1322] In some cases, the leader peptide is cleaved from the intact polypeptide to generate the mature form that may be soluble or secreted.

[1323] The TGFR/IL-15RαSu/anti-CD16scFv and TGFR/TF/IL-15 constructs were cloned into a modified retrovirus expression vectors as described previously (Hughes M S, Yu Y Y, Dudley M E, Zheng Z, Robbins P F, Li Y, et al. Transfer of a TCR gene derived from a patient with a marked antitumor response conveys highly active T-cell effector functions. Hum Gene Ther 2005; 16:457-72), and the expression vectors were transfected into CHO-K1 cells. Co-expression of the two constructs in CHO-K1 cells allowed for formation and secretion of the soluble TGFR/TF/IL-15:TGFR/IL-15RαSu/anti-CD16scFv protein complex (referred to as TGFRt15-TGFRs16), which can be purified by anti-TF IgG1 affinity and other chromatography methods.

### Example 60: The TGFRt15-TGFRs137L Fusion Protein Generation

[1324] A fusion protein complex was generated comprising of TGFβ Receptor II/IL-15RαSu/CD137L and TGFβ Receptor II/TF/IL-15 fusion proteins (FIG. 142 and FIG. 143). The human TGFβ Receptor II (Ile24-Asp159), tissue factor 219, CD137L, and IL-15 sequences were obtained from the UniProt website and DNA for these sequences was synthesized by Genewiz. Specifically, a construct was made linking two TGFβ Receptor II sequences with a G4S(3) linker to generate a single chain version of TGFβ Receptor II and then directly linking to the N-terminus coding region of tissue factor 219 followed by the N-terminus coding region of IL-15.

[1325] The nucleic acid and protein sequences of a construct comprising two TGFβ Receptor II linked to the N-terminus of tissue factor 219 following with the N-terminus of IL-15 are shown below.

[1326] The nucleic acid sequence of the TGFRt15 construct (including signal peptide sequence) is as follows:

(Signal peptide)
ATGAAGTGGGTGACCTTCATCAGCCTGCTGTTCCTGTTCTCCAGCGCCTA
CTCC
(Human TGFβ Receptor II fragments)
ATCCCCCCCCATGTGCAAAAGAGCGTGAACAACGATATGATCGTGACCGA
CAACAACGGCGCCGTGAAGTTTCCCCAGCTCTGCAAGTTCTGCGATGTCA
GGTTCAGCACCTGCGATAATCAGAAGTCCTGCATGTCCAACTGCAGCATC
ACCTCCATCTGCGAGAAGCCCCAAGAAGTGTGCGTGGCCGTGTGGCGGAA
AAATGACGAGAACATCACCCTGGAGACCGTGTGTCACGACCCCAAGCTCC
CTTATCACGACTTCATTCTGGAGGACGCTGCCTCCCCCAAATGCATCATG
AAGGAGAAGAAGAAGCCCGGAGAGACCTTCTTTATGTGTTCCTGTAGCAG
CGACGAGTGTAACGACAACATCATCTTCAGCGAAGAGTACAACACCAGCA
ACCCTGATGGAGGTGGCGGATCCGGAGGTGGAGGTTCTGGTGGAGGTGGG
AGTATTCCTCCCCACGTGCAGAAGAGCGTGAATAATGACATGATCGTGAC
CGATAACAATGGCGCCGTGAAATTTCCCCAGCTGTGCAAATTCTGCGATG
TGAGGTTTTCCACCTGCGACAACCAGAAGTCCTGTATGAGCAACTGCTCC
ATCACCTCCATCTGTGAGAAGCCTCAGGAGGTGTGCGTGGCTGTCTGGCG
GAAGAATGACGAGAATATCACCCTGGAAACCGTCTGCCACGATCCCAAGC
TGCCCTACCACGATTTCATCCTGGAAGACGCCGCCAGCCCTAAGTGCATC
ATGAAAGAGAAAAAGAAGCCTGGCGAGACCTTTTTCATGTGCTCCTGCAG
CAGCGACGAATGCAACGACAATATCATCTTTAGCGAGGAATACAATACCA
GCAACCCCGAC
(Human Tissue Factor 219)
AGCGGCACAACCAACACAGTCGCTGCCTATAACCTCACTTGGAAGAGCAC
CAACTTCAAAACCATCCTCGAATGGGAACCCAAACCCGTTAACCAAGTTT
ACACCGTGCAGATCAGCACCAAGTCCGGCGACTGGAAGTCCAAATGTTTC
TATACCACCGACACCGAGTGCGATCTCACCGATGAGATCGTGAAAGATGT
GAAACAGACCTACCTCGCCCGGGTGTTTAGCTACCCCGCCGGCAATGTGG
AGAGCACTGGTTCCGCTGGCGAGCCTTTATACGAGAACAGCCCCGAATTT
ACCCCTTACCTCGAGACCAATTTAGGACAGCCCACCATCCAAAGCTTTGA
GCAAGTTGGCACAAAGGTGAATGTGACAGTGGAGGACGAGCGGACTTTAG
TGCGGCGGAACAACACCTTTCTCAGCCTCCGGGATGTGTTCGGCAAAGAT
TTAATCTACACACTGTATTACTGGAAGTCCTCTTCCTCCGGCAAGAAGAC
AGCTAAAACCAACACAAACGAGTTTTTAATCGACGTGGATAAAGGCGAAA
ACTACTGTTTCAGCGTGCAAGCTGTGATCCCCTCCCGGACCGTGAATAGG
AAAAGCACCGATAGCCCCGTTGAGTGCATGGGCCAAGAAAAGGGCGAGTT
CCGGGAG
(Human IL-15)
AACTGGGTGAACGTCATCAGCGATTTAAAGAAGATCGAAGATTTAATTCA
GTCCATGCATATCGACGCCACTTTATACACAGAATCCGACGTGCACCCCT
CTTGTAAGGTGACCGCCATGAAATGTTTTTTACTGGAGCTGCAAGTTATC
TCTTTAGAGAGCGGAGACGCTAGCATCCACGACACCGTGGAGAATTTAAT
CATTTTAGCCAATAACTCTTTATCCAGCAACGGCAACGTGACAGAGTCCG
GCTGCAAGGAGTGCGAAGAGCTGGAGGAGAAGAACATCAAGGAGTTTCTG
CAATCCTTTGTGCACATTGTCCAGATGTTCATCAATACCTCC

[1327] The amino acid sequence of TGFRt15 fusion protein (including the leader sequence) is as follows:

(Signal peptide)
MKWVTFISLLFLFSSAYS
(Human TGFβ Receptor II)
IPPHVQKSVNNDMIVTDNNGAVKFPQLCKFCDVRFSTCDNQKSCMSNCSI
TSICEKPQEVCVAVWRKNDENITLETVCHDPKLPYHDFILEDAASPKCIM
KEKKKPGETFFMCSCSSDECNDNIIFSEEYNTSNPDGGGGSGGGGSGGGG
SIPPHVQKSVNNDMIVTDNNGAVKFPQLCKFCDVRFSTCDNQKSCMSNCS
ITSICEKPQEVCVAVWRKNDENITLETVCHDPKLPYHDFILEDAASPKCI
MKEKKKPGETFFMCSCSSDECNDNIIFSEEYNTSNPD
(Human Tissue Factor 219)
SGTTNTVAAYNLTWKSTNFKTILEWEPKPVNQVYTVQISTKSGDWKSKCF
YTTDTECDLTDEIVKDVKQTYLARVFSYPAGNVESTGSAGEPLYENSPEF
TPYLETNLGQPTIQSFEQVGTKVNVTVEDERTLVRRNNTFLSLRDVFGKD
LIYTLYYWKSSSSGKKTAKTNTNEFLIDVDKGENYCFSVQAVIPSRTVNR
KSTDSPVECMGQEKGEFRE
(Human IL-15)
NWVNVISDLKKIEDLIQSMHIDATLYTESDVHPSCKVTAMKCFLLELQVI
SLESGDASIHDTVENLIILANNSLSSNGNVTESGCKECEELEEKNIKEFL
QSFVHIVQMFINTS

[1328] Constructs were also made by attaching two TGFβ Receptor II directly to the IL-15RαSu chain, followed by a (G4S)3 linker and the CD137L sequence, which was synthesized by Genewiz. The nucleic acid and protein sequences of a construct comprising the TGFβ Receptor II linked to the N-terminus of IL-15RαSu following with a (G4S)3 linker and the CD137L sequence are shown below.

[1329] The nucleic acid sequence of the TGFRs137L construct (including signal peptide sequence) is as follows:

(Signal peptide)
ATGAAGTGGGTGACCTTCATCAGCCTGCTGTTCCTGTTCTCCAGCGCCTA
CTCC
(Human TGFβ Receptor II fragments)
ATCCCCCCCCATGTGCAAAAGAGCGTGAACAACGATATGATCGTGACCGA
CAACAACGGCGCCGTGAAGTTTCCCCAGCTCTGCAAGTTCTGCGATGTCA
GGTTCAGCACCTGCGATAATCAGAAGTCCTGCATGTCCAACTGCAGCATC
ACCTCCATCTGCGAGAAGCCCCAAGAAGTGTGCGTGGCCGTGTGGCGGAA
AAATGACGAGAACATCACCCTGGAGACCGTGTGTCACGACCCCAAGCTCC
CTTATCACGACTTCATTCTGGAGGACGCTGCCTCCCCCAAATGCATCATG
AAGGAGAAGAAGAAGCCCGGAGAGACCTTCTTTATGTGTTCCTGTAGCAG
CGACGAGTGTAACGACAACATCATCTTCAGCGAAGAGTACAACACCAGCA
ACCCTGATGGAGGTGGCGGATCCGGAGGTGGAGGTTCTGGTGGAGGTGGG
AGTATTCCTCCCCACGTGCAGAAGAGCGTGAATAATGACATGATCGTGAC
CGATAACAATGGCGCCGTGAAATTTCCCCAGCTGTGCAAATTCTGCGATG
TGAGGTTTTCCACCTGCGACAACCAGAAGTCCTGTATGAGCAACTGCTCC
ATCACCTCCATCTGTGAGAAGCCTCAGGAGGTGTGCGTGGCTGTCTGGCG
GAAGAATGACGAGAATATCACCCTGGAAACCGTCTGCCACGATCCCAAGC
TGCCCTACCACGATTTCATCCTGGAAGACGCCGCCAGCCCTAAGTGCATC
ATGAAAGAGAAAAAGAAGCCTGGCGAGACCTTTTTCATGTGCTCCTGCAG
CAGCGACGAATGCAACGACAATATCATCTTTAGCGAGGAATACAATACCA
GCAACCCCGAC
(Human IL-15R a sushi domain)
ATTACATGCCCCCCTCCCATGAGCGTGGAGCACGCCGACATCTGGGTGAA
GAGCTATAGCCTCTACAGCCGGGAGAGGTATATCTGTAACAGCGGCTTCA
AGAGGAAGGCCGGCACCAGCAGCCTCACCGAGTGCGTGCTGAATAAGGCT
ACCAACGTGGCTCACTGGACAACACCCTCTTTAAAGTGCATCCGG
((G4S)3 linker)
GGCGGTGGAGGATCCGGAGGAGGTGGCTCCGGCGGCGGAGGATCT
(Human CD137L)
CGCGAGGGTCCCGAGCTTTCGCCCGACGATCCCGCCGGCCTCTTGGACCT
GCGGCAGGGCATGTTTGCGCAGCTGGTGGCCCAAAATGTTCTGCTGATCG
ATGGGCCCCTGAGCTGGTACAGTGACCCAGGCCTGGCAGGCGTGTCCCTG
ACGGGGGGCCTGAGCTACAAAGAGGACACGAAGGAGCTGGTGGTGGCCAA
GGCTGGAGTCTACTATGTCTTCTTTCAACTAGAGCTGCGGCGCGTGGTGG
CCGGCGAGGGCTCAGGCTCCGTTTCACTTGCGCTGCACCTGCAGCCACTG
CGCTCTGCTGCTGGGGCCGCCGCCCTGGCTTTGACCGTGGACCTGCCACC
CGCCTCCTCCGAGGCTCGGAACTCGGCCTTCGGTTTCCAGGGCCGCTTGC
TGCACCTGAGTGCCGGCCAGCGCCTGGGCGTCCATCTTCACACTGAGGCC
AGGGCACGCCATGCCTGGCAGCTTACCCAGGGCGCCACAGTCTTGGGACT
CTTCCGGGTGACCCCCGAAATCCCAGCCGGACTCCCTTCACCGAGGTCGG
AA

[1330] The amino acid sequence of TGFRs137L fusion protein (including the leader sequence) is as follows:

(Signal peptide)
MKWVTFISLLFLFSSAYS
(Human TGFβ Receptor II)
IPPHVQKSVNNDMIVTDNNGAVKFPQLCKFCDVRFSTCDNQKSCMSNCSI
TSICEKPQEVCVAVWRKNDENITLETVCHDPKLPYHDFILEDAASPKCIM
KEKKKPGETFFMCSCSSDECNDNIIFSEEYNTSNPDGGGGSGGGGSGGGG
SIPPHVQKSVNNDMIVTDNNGAVKFPQLCKFCDVRFSTCDNQKSCMSNCS
ITSICEKPQEVCVAVWRKNDENITLETVCHDPKLPYHDFILEDAASPKCI
MKEKKKPGETFFMCSCSDECNDNIIFSEEYNTSNPD
(Human IL-15R a sushi domain)
ITCPPPMSVEHADIWVKSYSLYSRERYICNSGFKRKAGTSSLTECVLNKAT
NVAHWTTPSLKCIR
((G4S)3 linker)
GGGGSGGGGSGGGGS
(Human CD137L)
REGPELSPDDPAGLLDLRQGMFAQLVAQNVLLIDGPLSWYSDPGLAGVSLT
GGLSYKEDTKELVVAKAGVYYVFFQLELRRVVAGEGSGSVSLALHLQPLRS
AAGAAALALTVDLPPASSEARNSAFGFQGRLLHLSAGQRLGVHLHTEARAR
HAWQLTQGATVLGLFRVTPEIPAGLPSPRSE

[1331] In some cases, the leader peptide is cleaved from the intact polypeptide to generate the mature form that may be soluble or secreted.

[1332] The TGFR/IL-15RαSu/CD137L and TGFR/TF/IL-15 constructs were cloned into a modified retrovirus expression vectors as described previously (Hughes M S, Yu Y Y, Dudley M E, Zheng Z, Robbins P F, Li Y, et al. Transfer of a TCR gene derived from a patient with a marked antitumor response conveys highly active T-cell effector functions. Hum Gene Ther 2005; 16:457-72), and the expression vectors were transfected into CHO-K1 cells. Co-expression of the two constructs in CHO-K1 cells allowed for formation and secretion of the soluble TGFR/TF/IL-15:TGFR/IL-15RαSu/CD137L protein complex (referred to as TGFRt15-TGFRs137L), which can be purified by anti-TF IgG1 affinity and other chromatography methods.

### Example 61. Production and Characterization of the Exemplary Single-Chain Chimeric Polypeptide 2t2

[1333] An exemplary single-chain chimeric polypeptide including a first target-binding domain that binds to an IL-2 receptor, a soluble human tissue factor domain, and a second target-binding domain that binds to an IL-2 receptor was generated (IL-2/TF/IL-2; referred to as 2t2) (FIG. 144). The nucleic acid and amino acid sequences of this single-chain chimeric polypeptide are shown below.

### Nucleic Acid Encoding Exemplary Single-Chain Chimeric Polypeptide (IL-2/TF/IL-2) (SEQ ID NO: 164)

(Signal peptide)
ATGAAGTGGGTGACCTTCATCAGCCTGCTGTTCCTGTTCTCCAGCGCCTAC
TCC
(First IL-2 fragment)
GCCCCCACCTCCTCCTCCACCAAGAAGACCCAGCTGCAGCTGGAGCATTTA
CTGCTGGATTTACAGATGATTTTAAACGGCATCAACAACTACAAGAACCCC
AAGCTGACTCGTATGCTGACCTTCAAGTTCTACATGCCCAAGAAGGCCACC
GAGCTGAAGCATTTACAGTGTTTAGAGGAGGAGCTGAAGCCCCTCGAGGAG
GTGCTGAATTTAGCCCAGTCCAAGAATTTCCATTTAAGGCCCCGGGATTTA
ATCAGCAACATCAACGTGATCGTTTTAGAGCTGAAGGGCTCCGAGACCACC
TTCATGTGCGAGTACGCCGACGAGACCGCCACCATCGTGGAGTTTTTAAAT
CGTTGGATCACCTTCTGCCAGTCCATCATCTCCACTTTAACC
(Human tissue factor 219 form)
AGCGGCACAACCAACACAGTCGCTGCCTATAACCTCACTTGGAAGAGCACC
AACTTCAAAACCATCCTCGAATGGGAACCCAAACCCGTTAACCAAGTTTAC
ACCGTGCAGATCAGCACCAAGTCCGGCGACTGGAAGTCCAAATGTTTCTAT
ACCACCGACACCGAGTGCGATCTCACCGATGAGATCGTGAAAGATGTGAAA
CAGACCTACCTCGCCCGGGTGTTTAGCTACCCCGCCGGCAATGTGGAGAGC
ACTGGTTCCGCTGGCGAGCCTTTATACGAGAACAGCCCCGAATTTACCCCT
TACCTCGAGACCAATTTAGGACAGCCCACCATCCAAAGCTTTGAGCAAGTT
GGCACAAAGGTGAATGTGACAGTGGAGGACGAGCGGACTTTAGTGCGGCGG
AACAACACCTTTCTCAGCCTCCGGGATGTGTTCGGCAAAGATTTAATCTAC
ACACTGTATTACTGGAAGTCCTCTTCCTCCGGCAAGAAGACAGCTAAAACC
AACACAAACGAGTTTTTAATCGACGTGGATAAAGGCGAAAACTACTGTTTC
AGCGTGCAAGCTGTGATCCCCTCCCGGACCGTGAATAGGAAAAGCACCGAT
AGCCCCGTTGAGTGCATGGGCCAAGAAAAGGGCGAGTTCCGGGAG
(Second IL-2 fragment)
GCACCTACTTCAAGTTCTACAAAGAAAACACAGCTACAACTGGAGCATTTA
CTGCTGGATTTACAGATGATTTTGAATGGAATTAATAATTACAAGAATCCC
AAACTCACCAGGATGCTCACATTTAAGTTTTACATGCCCAAGAAGGCCACA
GAACTGAAACATCTTCAGTGTCTAGAAGAAGAACTCAAACCTCTGGAGGAA
GTGCTAAATTTAGCTCAAAGCAAAAACTTTCACTTAAGACCCAGGGACTTA
ATCAGCAATATCAACGTAATAGTTCTGGAACTAAAGGGATCTGAAACAACA
TTCATGTGTGAATATGCTGATGAGACAGCAACCATTGTAGAATTTCTGAAC
AGATGGATTACCTTTTGTCAAAGCATCATCTCAACACTAACT

### Exemplary Single-Chain Chimeric Polypeptide (IL-2/TF/IL-2) (SEQ ID NO: 163)

(Signal peptide)
MKWVTFISLLFLFSSAYS
(Human IL-2)
[sequence omitted]
(Human Tissue Factor 219)
SGTTNTVAAYNLTWKSTNFKTILEWEPKPVNQVYTVQISTKSGDWKSKCFY
TTDTECDLTDEIVKDVKQTYLARVFSYPAGNVESTGSAGEPLYENSPEFTP
YLETNLGQPTIQSFEQVGTKVNVTVEDERTLVRRNNTFLSLRDVFGKDLIY
TLYYWKSSSSGKKTAKTNTNEFLIDVDKGENYCFSVQAVIPSRTVNRKSTD
SPVECMGQEKGEFRE
(Human IL-2)
[sequence omitted]

[1336] The nucleic acid encoding IL-2/TF/IL-2 was cloned into a modified retrovirus expression vector as described previously (Hughes et al., Hum Gene Ther 16:457-72, 2005). The expression vector encoding IL-2/TF/IL-2 was transfected into CHO-K1 cells. Expression of the expression vector in CHO-K1 cells allowed for secretion of the soluble IL-2/TF/IL-2 single-chain chimeric polypeptide (referred to as 2t2), which can be purified by anti-TF antibody affinity and other chromatography methods.

### IL-2 and 2t2 Promoted IL-2R/3 and Common γ Chain Containing 32Dβ Cell Proliferation in a Similar Manner

[1337] To evaluate the IL-2 activity of 2t2, 2t2 was compared with recombinant IL-2 for promoting proliferation of 32Dβ cells that express IL-2R13 and common γ chain. IL-2 dependent 32Dβ cells were washed 5 times with IMDM-10% FBS and seeded to the wells at 2×10⁴ cells/well. Serial dilutions of 2t2 or IL-2 were added to the cells (FIG. 145). Cells were incubated in a CO₂ incubator at 37° C. for 3 days. Cell proliferation was detected by adding 10 μl of WST1 to each well on day 3 and incubating for an additional 3 hours in a CO₂ incubator at 37° C. The amount of formazan dye produced was analyzed by measuring the absorbance at 450 nm. As shown in FIG. 145, 2t2 and IL-2 activated 32Dβ cells in a similar manner. The EC₅₀ of 2t2 and IL-2 was 158.1 pM and 140 pM, respectively.

### 2t2 Showed Improved Ability to Promote IL-2Rαβγ Containing CTLL-2 Cell Proliferation as Compared to IL-2

[1338] To evaluate the IL-2 activity of 2t2, 2t2 was compared with recombinant IL-2 for promoting proliferation of CTLL-2 cells that express IL-2Ra, IL-2R13 and common γ chain. IL-2 dependent CTLL-2 cells were washed 5 times with IMDM-10% FBS and seeded to the wells at 2×10⁴ cells/well. Serial dilutions of 2t2 or IL-2 were added to the cells (FIG. 146). Cells were incubated in a CO₂ incubator at 37° C. for 3 days. Cell proliferation was detected by adding 10 μl of WST1 to each well in the day 3 and incubating for an additional 3 hours in a CO₂ incubator at 37° C. The amount of formazan dye produced was analyzed by measuring the absorbance at 450 nm. As shown in FIG. 146, 2t2 promoted CTLL-2 cell proliferation 4-5-fold stronger than IL-2. The EC₅₀ of 2t2 was 123.2 pM and IL-2 was 548.2 pM.

### 2t2 Suppressed the Increase of the High Fat-Induced Hyperglycemia in ApoE^{-/-} Mice

[1339] Six-week-old female ApoE^{-/-} mice (Jackson Lab) were fed with standard chow diet or high diet fat containing 21% fat, 0.15% cholesterol, 34.1% sucrose, 19.5% casein, and 15% starch (TD88137, Harlan Laboratories) and maintained in the standard conditions. At week 7, mice fed with high fat diet were randomly assigned into the control group and treatment group. Mice then received either 2t2 (treatment group) or

[1340] PBS (chow diet group and control group) per subcutaneous injection at a dosage of 3 mg/kg. Three days post dosing, the mice were fasted overnight, and blood samples were collected through retro-orbital venous plexus puncture. Overnight fasting glucose levels were measured using a OneTouch Glucometer. As shown in FIG. 147, the results showed that 2t2 injection effectively suppresses the increase of glucose levels in ApoE^{-/-} mice.

2t2 Significantly Upregulate the Ratio of CD4⁺CD25⁺FoxP3⁺ T Regulatory (Treg) Cells in Blood Lymphocytes

[1341] Six-week-old female ApoE^{-/-} mice (Jackson Lab) were fed with standard chow diet or high diet fat containing 21% fat, 0.15% cholesterol, 34.1% sucrose, 19.5% casein, and 15% starch (TD88137, Harlan Laboratories) and maintained in the standard conditions. At week 7, mice fed with the high fat diet were randomly assigned into control group and treatment group. Mice then received either 2t2 (treatment group) or PBS (chow diet group and control group) per subcutaneous injection at a dosage of 3 mg/kg. Three days after the dosing, overnight fasting blood samples were collected through retro-orbital venous plexus puncture and incubated with ACK lysing buffer (Thermo Fisher Scientific) at 37° C. for 5 minutes. Samples were then resuspended in FACS buffer (1×PBS (Hyclone) with 0.5% BSA (EMD Millipore) and 0.001% sodium azide (Sigma)) and surface stained with FITC-anti-CD4 and APC-anti-CD25 antibodies (BioLegend) for 30 minutes. Surface-stained samples were further fixed and premetallized with Fix/Perm buffer (BioLegend) and intracellular stained with PE-anti-Foxp3 antibody (BioLegend). After staining, cells were washed twice with FACs buffer followed by centrifugation at 1500 RPM for 5 minutes at room temperature. The cells were analyzed by flow cytometry (Celesta-BD Bioscience). As shown in FIG. 148, 2t2 treatment significantly increased Treg populations in blood lymphocytes (3.5%±0.32) compared to the untreated groups (0.4%±0.16 for chow diet group and 0.46%±0.09 for high fat diet group).

Purification Elution Chromatograph of 2t2 from Anti-TF Antibody Affinity Column

[1342] 2t2 harvested from cell culture was loaded onto the anti-TF antibody affinity column equilibrated with 5 column volumes of PBS. After sample loading, the column was washed with 5 column volumes of PBS, followed by elution with 6 column volumes of 0.1M acetic acid, pH 2.9. A280 elution peak was collected and then neutralized to pH 7.5-8.0 with 1M Tris base. The neutralized sample was then buffer exchanged into PBS using Amicon centrifugal filters with a 30 kDa molecular weight cutoff. As shown in FIG. 149, the anti-TF antibody affinity column bound to 2t2 which contains TF as a fusion domain. The buffer-exchanged protein sample was stored at 2-8° C. for further biochemical analyses and biological activity tests. After each elution, the anti-TF antibody affinity column was stripped using 6 column volumes of 0.1M glycine, pH 2.5. The column was then neutralized using 5 column volumes of PBS, and 7 column volumes of 20% ethanol for storage. The anti-TF antibody affinity column was connected to a GE Healthcare AKTA Avant system. The flow rate was 4 mL/min for all steps except for the elution step, which was 2 mL/min.

### Analytical Size Exclusion Chromatography (SEC) Analysis of 2t2

[1343] To analyze 2t2 using analytical size exclusion chromatography (SEC), a Superdex 200 Increase 10/300 GL gel filtration column (from GE Healthcare) was connected to an AKTA Avant system (from GE Healthcare). The column was equilibrated with 2 column volumes of PBS. The flow rate was 0.7 mL/min. A sample containing 2t2 in PBS was injected into the Superdex 200 column using a capillary loop, and analyzed by SEC. The SEC chromatograph of the sample is shown in FIG. 150. The SEC results indicated two protein peaks for 2t2.

### Reduced SDS PAGE of 2t2

[1344] To determine the purity and molecular weight of the protein, 2t2 protein sample purified with anti-TF antibody affinity column was analyzed by sodium dodecyl sulfate polyacrylamide gel (4-12% NuPage Bis-Tris gel) electrophoresis (SDS-PAGE) method under reduced condition. After electrophoresis, the gel was stained with InstantBlue for about 30 min, followed by destaining overnight in purified water.

[1345] To verify that the 2t2 protein undergoes glycosylation after translation in CHO cells, a deglycosylation experiment was conducted using the Protein Deglycosylation Mix II kit from New England Biolabs according to the manufacturer's instructions. FIGS. 151A and 151B show the reduced SDS-PAGE analysis of the sample in non-deglycosylated (lane 1 in red outline) and deglycosylated (lane 2 in yellow outline) state. The results show that the 2t2 protein is glycosylated when expressed in CHO cells. After deglycosylation, the purified sample ran with expected molecular weights (56 kDa) in reduced SDS gel. Lane M was loaded with 10 μL of SeeBlue Plus2 Prestained Standard.

### In Vivo Characterization of 2t2

[1346] 2t2 was subcutaneously injected into C57BL/6 mice at various doses to determine the immunostimulatory activity of 2t2 in vivo. Mice were subcutaneously treated with control solution (PBS) or 2t2 at 0.1, 0.4, 2 and 10 mg/kg. The treated mice were euthanized day 3 post treatment. The mouse spleens were collected and weighed day 3 post treatment. Single splenocyte suspensions were prepared, and the prepared splenocytes were stained for CD4⁺ T cells, CD8⁺ T cells and NK cells (with fluorochrome-conjugated anti-CD4, -CD8, and -NK1.1 antibodies), and analyzed by flow cytometry. The results showed that 2t2 was effective at expanding splenocytes based on spleen weight (FIG. 152A) especially at 0.1-10 mg/kg. The percentage of CD8⁺ T cells were higher compared to control-treated mice (FIG. 152B) at 2 and 10 mg/kg. The percentage of NK cells were higher compared to control-treated mice (FIG. 152B) at all doses tested.

[1347] It has been known that IL-2 upregulates CD25 expression by immunocytes. We therefore accessed CD25 expression of CD4⁺ T cells, CD8⁺ T cells and NK cells in the 2t2 treated mice. C57BL/6 mice were subcutaneously treated with 2t2 as described in the paragraph above. The splenocytes were stained with fluorochrome-conjugated anti-CD4, -CD8, CD25 and NK1.1 monoclonal antibodies. The CD25 expression (MFI) of splenocyte subsets was analyzed by flow cytometry. As shown in FIG. 153, at the doses and time points tested, 2t2 significantly upregulated CD25 expression by CD4⁺ T cells but not CD8+ T cells or NK cells.

[1348] The pharmacokinetics of 2t2 in C57BL/6 mice were also investigated. 2t2 was subcutaneously injected into C57BL/6 mice at 1 mg/kg. The mouse blood was drawn from tail vein at various time points as shown in FIG. 154 and the serum was prepared. 2t2 concentrations were determined with ELISA (Capture: anti-tissue factor antibody; Detection: biotinylated anti-human IL-2 antibody followed by SA-HRP and ABTS substrate). The half-life of 2t2 was 1.83 hours calculated with PK Solutions 2.0 (Summit Research Services).

### 2t2 Attenuated the Formation of High Fat-Induced Atherosclerotic Plaques in ApoE^{-/-} Mice

[1349] Six-week-old female ApoE^{-/-} mice (The Jackson Laboratory) were fed with standard chow diet or high diet fat (21% fat, 0.15% cholesterol, 34.1% sucrose, 19.5% casein, and 15% starch) (TD88137, Harlan Laboratories) and maintained in the standard conditions. At week 7, mice fed with high fat diet (HFD) were randomly assigned into control group and treatment group. Mice were then administrated either 2t2 (treatment group) or PBS (chow diet group and control group) subcutaneously at a dosage of 3 mg/kg weekly for 4 weeks. At week 12, all mice were euthanized by isoflurane. Aortas were collected, opened longitudinally and stained with Sudan IV solution (0.5%) using en face method. The percentage of plaque area (red color as shown in FIG. 155A) relative to total aorta area was then quantified with Image J software. FIG. 155A shows a representative view of atherosclerotic plaques from each group. FIG. 155B shows the results of quantitative analysis of atherosclerotic plaques of each group. The percentage of plaque areas in control group (HF Diet) was much higher than the treatment group (HFD+2t2), being 10.28% vs 4.68%.

### 2t2 Suppresses the Progression of Type 2 Diabetes.

[1350] Male BKS.Cg-Dock7^{m}+/+Lepr^{db}/J (db/db (Jackson Lab)) mice were fed with standard chow diet and received drinking water ad libitum. At the age of six weeks, mice were randomly assigned into control group and treatment group. The treatment group received 2t2 by subcutaneous injection at 3 mg/kg bi-weekly, while control group received vehicle (PBS) only. Overnight fasting glucose levels were measure weekly using a OneTouch Glucometer. The results showed that 2t2 effectively suppressed the increase of glucose levels in BKS.Cg-Dock7^{m}+/+Lepr^{db}/J mice (FIG. 156).

2t2 Significantly Upregulates the Ratio of CD4+CD25±FoxP3+T Regulatory Cells in Blood Lymphocytes after the First Injection

[1351] Male BKS.Cg-Dock7^{m}+/+Lepr^{db}/J (db/db) (The Jackson Laboratory) mice were fed with standard chow diet and received drinking water ad libitum. At the age of six weeks, mice were randomly assigned into control group and treatment group. The treatment group received 2t2 by subcutaneous injection at 3 mg/kg bi-weekly, while the control group received vehicle (PBS) only. Four days after the first drug injection, overnight fasting blood samples were collected and incubated with ACK lysing buffer (Thermo Fisher Scientific) at 37° C. for 5 minutes. Samples were then resuspended in FACS buffer (1×PBS (Hyclone) with 0.5% BSA (EMD Millipore) and 0.001% sodium azide (Sigma)) and surface stained with FITC-anti-CD4 and APC-anti-CD25 antibodies (BioLegend) for 30 minutes. Surface-stained samples were further fixed and premetallized with Fix/Perm buffer (BioLegend) and intracellular stained with PE-anti-Foxp3 antibody (BioLegend). After staining, cells were washed twice with FACs buffer and were analyzed by flow cytometry (Celesta-BD Bioscience). The percentage of CD4⁺CD25⁺ FoxP3⁺ Tregs in blood lymphocytes were measured. As shown in FIG. 157, the results showed that 2t2 significantly upregulated the ratio of Tregs in blood lymphocytes (* p<0.05).

### Example 62. Production and Characterization of the Exemplary Single-Chain Chimeric Polypeptide 15t15

[1352] A second exemplary single-chain chimeric polypeptide including a first target-binding domain that binds to an IL-15 receptor, a soluble human tissue factor domain, and a second target-binding domain that binds to an IL-15 receptor was generated (IL-15/TF/IL-15; referred to at 15t15) (FIG. 158). The nucleic acid and amino acid sequences of this single-chain chimeric polypeptide are shown below.

### Nucleic Acid Encoding Exemplary Single-Chain Chimeric Polypeptide (IL-15/TF/IL-15) (SEQ ID NO: 170)

(Signal peptide)
ATGAAGTGGGTGACCTTCATCAGCCTGCTGTTCCTGTTCTCCAGCGCCT
ACTCC
(First IL-15 fragment)
AACTGGGTGAACGTGATCAGCGATTTAAAGAAGATCGAGGATTTAATCCA
GAGCATGCACATCGACGCCACTCTGTACACTGAGAGCGACGTGCACCCTA
GCTGCAAGGTGACTGCCATGAAGTGCTTTTTACTGGAGCTGCAAGTTATC
TCTTTAGAGAGCGGCGATGCCAGCATCCACGACACTGTGGAGAATTTAAT
CATTTTAGCCAACAACTCTTTAAGCAGCAACGGCAACGTGACAGAGAGCG
GCTGCAAGGAGTGCGAGGAGCTGGAGGAGAAGAACATCAAGGAGTTTTTA
CAGAGCTTCGTGCACATCGTGCAGATGTTCATCAACACTAGC
(Human tissue factor 219 form)
AGCGGCACAACCAACACAGTCGCTGCCTATAACCTCACTTGGAAGAGCAC
CAACTTCAAAACCATCCTCGAATGGGAACCCAAACCCGTTAACCAAGTTT
ACACCGTGCAGATCAGCACCAAGTCCGGCGACTGGAAGTCCAAATGTTTC
TATACCACCGACACCGAGTGCGATCTCACCGATGAGATCGTGAAAGATGT
GAAACAGACCTACCTCGCCCGGGTGTTTAGCTACCCCGCCGGCAATGTGG
AGAGCACTGGTTCCGCTGGCGAGCCTTTATACGAGAACAGCCCCGAATTT
ACCCCTTACCTCGAGACCAATTTAGGACAGCCCACCATCCAAAGCTTTGA
GCAAGTTGGCACAAAGGTGAATGTGACAGTGGAGGACGAGCGGACTTTAG
TGCGGCGGAACAACACCTTTCTCAGCCTCCGGGATGTGTTCGGCAAAGAT
TTAATCTACACACTGTATTACTGGAAGTCCTCTTCCTCCGGCAAGAAGAC
AGCTAAAACCAACACAAACGAGTTTTTAATCGACGTGGATAAAGGCGAAA
ACTACTGTTTCAGCGTGCAAGCTGTGATCCCCTCCCGGACCGTGAATAGG
AAAAGCACCGATAGCCCCGTTGAGTGCATGGGCCAAGAAAAGGGCGAGTT
CCGGGAG
(Second IL-15 fragment)
AACTGGGTGAACGTCATCAGCGATTTAAAGAAGATCGAAGATTTAATTCA
GTCCATGCATATCGACGCCACTTTATACACAGAATCCGACGTGCACCCCT
CTTGTAAGGTGACCGCCATGAAATGTTTTTTACTGGAGCTGCAAGTTATC
TCTTTAGAGAGCGGAGACGCTAGCATCCACGACACCGTGGAGAATTTAAT
CATTTTAGCCAATAACTCTTTATCCAGCAACGGCAACGTGACAGAGTCCG
GCTGCAAGGAGTGCGAAGAGCTGGAGGAGAAGAACATCAAGGAGTTTCTG
CAATCCTTTGTGCACATTGTCCAGATGTTCATCAATACCTCC

### Exemplary Single-Chain Chimeric Polypeptide (IL-15/TF/IL-15) (SEQ ID NO: 169)

(Signal peptide)
MKWVTFISLLFLFSSAYS
(Human IL-15)
NWVNVISDLKKIEDLIQSMHIDATLYTESDVHPSCKVTAMKCFLLELQV
ISLESGDASIHDTVENLIILANNSLSSNGNVTESGCKECEELEEKNIKE
FLQSFVHIVQMFINTS
(Human Tissue Factor 219)
SGTTNTVAAYNLTWKSTNFKTILEWEPKPVNQVYTVQISTKSGDWKSKC
FYTTDTECDLTDEIVKDVKQTYLARVFSYPAGNVESTGSAGEPLYENSP
EFTPYLETNLGQPTIQSFEQVGTKVNVTVEDERTLVRRNNTFLSLRDVF
GKDLIYTLYYWKSSSSGKKTAKTNTNEFLIDVDKGENYCFSVQAVIPSR
TVNRKSTDSPVECMGQEKGEFRE
(Human IL-15)
NWVNVISDLKKIEDLIQSMHIDATLYTESDVHPSCKVTAMKCFLLELQV
ISLESGDASIHDTVENLIILANNSLSSNGNVTESGCKECEELEEKNIKE
FLQSFVHIVQNIFINTS

[1355] The nucleic acid encoding IL-15/TF/IL-15 was cloned into a modified retrovirus expression vector as described previously (Hughes et al., Hum Gene Ther 16:457-72, 2005). The expression vector encoding IL-15/TF/IL-15 was transfected into CHO-K1 cells. Expression of the expression vector in CHO-K1 cells allowed for secretion of the soluble IL-15/TF/IL-15 single-chain chimeric polypeptide (referred to as 15t15), which can be purified by anti-TF antibody affinity and other chromatography methods.

### 15t15 Promotes IL-2R/3 and Common γ Chain Containing 32Dβ Cell Proliferation

[1356] IL-15 activity of 15t15 was compared with recombinant IL-15 in IL2Rβ and common γ chain expressed 32Dβ cells. IL-15 dependent 32Dβ cells were washed five times with IMDM-10% FBS and seeded to the wells at 2×10⁴ cells/well. Serial dilutions of 15t15 or IL-15 were added to the cells (FIG. 159). Cells were incubated in a CO₂ incubator at 37° C. for 3 days. Cell proliferation was detected by adding 10 μl of WST1 to each well in the day 3 and incubating for an additional 3 hours in a CO₂ incubator at 37° C. The amount of formazan dye produced was analyzed by measuring the absorbance at 450 nm. As shown in FIG. 159, 15t15 promoted 32Dβ cell proliferation less efficiently as compared to IL-15. The EC₅₀ of 15t15 and IL-15 was 161.4 pM and 1.6 pM, respectively.

Purification Elution Chromatograph of 15t15 from Anti-TF Antibody Affinity Column

[1357] 15t15 harvested from cell culture was loaded onto the anti-TF antibody affinity column equilibrated with 5 column volumes of PBS. After sample loading, the column was washed with 5 column volumes of PBS, followed by elution with 6 column volumes of 0.1M acetic acid, pH 2.9. A280 elution peak was collected and then neutralized to pH 7.5-8.0 with 1M Tris base. The neutralized sample was then buffer exchanged into PBS using Amicon centrifugal filters with a 30 kDa molecular weight cutoff. As shown in FIG. 160, the anti-TF antibody affinity column bound to 15t15 which contains TF as a fusion domain. The buffer-exchanged protein sample was stored at 2-8° C. for further biochemical analyses and biological activity tests. After each elution, the anti-TF antibody affinity column was stripped using 6 column volumes of 0.1M glycine, pH 2.5. The column was then neutralized using 5 column volumes of PBS, and 7 column volumes of 20% ethanol for storage. The anti-TF antibody affinity column was connected to a GE Healthcare AKTA Avant system. The flow rate was 4 mL/min for all steps except for the elution step, which was 2 mL/min.

### Reduced SDS-PAGE of 15t15

[1358] To determine the purity and molecular weight of the protein, 15t15 protein sample purified with anti-TF antibody affinity column was analyzed by sodium dodecyl sulfate polyacrylamide gel (4-12% NuPage Bis-Tris gel) electrophoresis (SDS-PAGE) method under reduced condition. After electrophoresis, the gel was stained with InstantBlue for about 30 min, followed by destaining overnight in purified water.

[1359] To verify that the 15t15 protein undergoes glycosylation after translation in CHO cells, a deglycosylation experiment was conducted using the Protein Deglycosylation Mix II kit from New England Biolabs and the manufacturer's instructions. FIGS. 161A and 161B show the reduced SDS-PAGE analysis of the sample in non-deglycosylated (lane 1 in red outline) and deglycosylated (lane 2 in yellow outline) state. The results showed that the 15t15 protein is glycosylated when expressed in CHO cells. After deglycosylation, the purified sample ran with expected molecular weights (50 kDa) in reduced SDS gel. Lane M was loaded with 10 μL of SeeBlue Plus2 Prestained Standard.

### Example 63: Stimulation of NK Cells In Vitro

[1360] A set of experiments was performed to assess the changes in surface phenotype of NK cells after stimulation with 18t15-12s, 18t15-12s16, and 7t15-21s+anti-TF antibody. In these experiments, fresh human leukocytes were obtained from the blood bank and CD56⁺ NK cells were isolated with the RosetteSep/human NK cell reagent (StemCell Technologies). The purity of NK cells was >90% and confirmed by staining with CD56-BV421, CD16-BV510, CD25-PE, and CD69-APCFire750 antibodies (BioLegend). The cells were counted and resuspended at 0.2×10⁶/mL in a 96-well flat-bottom plate in 0.2 mL of complete media (RPMI 1640 (Gibco) supplemented with 2 mM L-glutamine (Thermo Life Technologies), penicillin (Thermo Life Technologies), streptomycin (Thermo Life Technologies), and 10% FBS (Hyclone)). The cells were stimulated with: 18t15-12s (100 nM); 18t15-12s16 (100 nM); a mixture of single cytokines rhIL-15 (50 ng/mL) (Miltenyi), rhIL18 (50 ng/mL) (Invivogen), and rhIL-12 (10 ng/mL) (Peprotech); 7t15-21s+anti-TF antibody (100 nM-50 nM); 7t15-21s (100 nM); or anti-TF antibody (50 nM) at 37° C. and 5% CO₂ for 16 hours. The next day, the cells were harvested and surface stained for 30 minutes with CD56, CD16, CD25, CD69, CD27, CD62L, NKp30, and NKp44 specific antibodies. After surface staining, the cells were washed (1500 RPM for 5 minutes at room temperature) in FACS buffer (1×PBS (Hyclone) with 0.5% BSA (EMD Millipore) and 0.001% sodium azide (Sigma)). After two washes, the cells were analyzed by flow cytometry (Celesta-BD Bioscience). FIGS. 162A and 162B shows that overnight incubation of purified NK cells with 18t15-12s, 18t15-12s16, and 7t15-21s+anti-TF antibody resulted in an increase in the percentage of cells expressing CD25, CD69, NKp44, and NKp30 activation markers and a decrease in the percentage of cells expressing CD62L. All activation marker data is from CD56⁺ gated lymphocytes.

[1361] A set of experiments was performed to assess changes in the surface phenotype of lymphocyte populations after stimulation with 18t15-12s, 18t15-12s16, and 7t15-21s. In these experiments, fresh human leukocytes were obtained from the blood bank. Peripheral blood lymphocytes were isolated with the Ficoll-PAQUE Plus (GE Healthcare) density gradient media. The cells were counted and resuspended at 0.2×10⁶/mL in a 96-well flat-bottom plate in 0.2 mL of complete media (RPMI 1640 (Gibco) supplemented with 2 mM L-glutamine (Thermo Life Technologies), penicillin (Thermo Life Technologies), streptomycin (Thermo Life Technologies), and 10% FBS (Hyclone)). The cells were stimulated with: 18t15-12s (100 nM); 18t15-12s16 (100 nM), a mixture of single cytokines rhIL-15 (50 ng/mL) (Miltenyi), rhIL18 (50 ng/mL) (Invivogen), and rhIL-12 (10 ng/mL) (Peprotech); 7t15-21s (100 nM)+anti-TF antibody (50 nM); 7t15-21s (100 nM); or anti-TF antibody (50 nM) at 37° C. and 5% CO₂ for 16 hours. The next day, the cells were harvested and surface stained for 30 minutes for CD4 or CD8, CD62L, and CD69 specific antibodies. After surface staining, cells were washed (1500 RPM for 5 minutes at room temperature) in FACS buffer (1×PBS (Hyclone) with 0.5% BSA (EMD Millipore) and 0.001% sodium azide (Sigma)). After two washes, the cells were analyzed by flow cytometry (Celesta-BD Bioscience). FIG. 163 shows that overnight incubation of purified lymphocyte populations (CD4 and CD8 T cells) with 18t15-12s, 18t15-12s16, or 7t15-21s+anti-TF antibody resulted in an increase in the percentage of CD8 and CD4 T cells expressing CD69. Additionally, incubation with 7t15-21s+anti-TF antibody resulted in an increase in the percentage of CD8 and CD4 T cells expressing CD62L (FIG. 163).

[1362] A set of experiments was performed to determine the effect of 18t15-12s on the extracellular acidification rate (ECAR) of NK cells purified from human blood. ECAR can be used to measure glycolysis. Glycolysis is the intracellular biochemical conversion of one molecule of glucose into two molecules of pyruvate with the concurrent generation of two molecules of ATP. An increase in glycolysis was indicated by an increase in ECAR measured by a Seahorse XF96 Analyzer. In these experiments, fresh human leukocytes were obtained from the blood bank and CD56⁺ NK cells were isolated with the RosetteSep/human NK cell reagent (StemCell Technologies). The purity of NK cells was >70% and confirmed by staining for CD56-BV421, CD16-BV510, CD25-PE, and CD69-APCFire750 antibodies (BioLegend). The cells were counted and resuspended in 0.2×10⁶/mL in a 96-well flat-bottom plate in 0.2 mL of complete media (RPMI 1640 (Gibco) supplemented with 2 mM L-glutamine (Thermo Life Technologies), penicillin (Thermo Life Technologies), streptomycin (Thermo Life Technologies), and 10% FBS (Hyclone)). The cells were stimulated with either a mixture of single cytokines hIL-12 (10 ng/mL) (Biolegend), hIL-18 (50 ng/mL) (R&D), and hIL-15 (50 ng/mL) (NCI) or 18t15-12s (100 nM) at 37° C. and 5% CO₂ for 14-18 hours. The next day, the cells were harvested and washed two times in Seahorse media. The cells (2×10⁵ cells/well) were seeded in 96-well flux plates that were coated with 10 μL of poly-L-lysine (Sigma). NK cells were adhered to plates for 30 minutes prior to the assay. Glucose, oligomycin, and 2DG solutions were prepared at 10× concentration in buffered Seahorse medium and injected in port A, B, and C of the calibration plate. ECAR readings were taken every 6.5-7 minutes and ECAR results represent the average readings over 80 minutes or average readings at each timepoint. FIG. 164 shows overnight stimulation of NK cells with 18t15-12s resulted in increased basal ECAR levels. The addition of glucose and oligomycin further showed enhanced glycolysis and glycolytic capacity, respectively, of NK cells stimulated with 18t15-12s overnight (FIG. 164). NK cells treated overnight with media alone or a mixture of IL12, IL18, and IL-15 were used for comparison (FIG. 164).

[1363] A set of experiments was performed to determine the increase in phospho-STAT4 and phospho-STAT5 levels in NK cells after stimulation with 18t15-12s. In these experiments, fresh human leukocytes were obtained from the blood bank and CD56⁺ NK cells were isolated with the RosetteSep/human NK cell reagent (StemCell Technologies). The purity of NK cells was >70% and confirmed by staining with CD56-BV421, CD16-BV510, CD25-PE, and CD69-APCFire750 specific antibodies (BioLegend). The cells were counted and resuspended in 0.05×10⁶/mL in a 96-well flat-bottom plate in 0.1 mL of complete media (RPMI 1640 (Gibco) supplemented with 2 mM L-glutamine (Thermo Life Technologies), penicillin (Thermo Life Technologies), streptomycin (Thermo Life Technologies), and 10% FBS (Hyclone)). The cells were stimulated with hIL-12 (10 ng/mL) (Biolegend) or hIL-15 (50 ng/mL) (NCI) (Single cytokines), or 18t15-12s (100 nM) at 37° C. and 5% CO₂ for 90 minutes. Unstimulated NK cells (US) were used as a control. The cells were harvested and fixed in paraformaldehyde (Sigma) to a final concentration of 1.6%. Plates were incubated in the dark at room temperature for 10 minutes. FACS buffer (1×PBS (Hyclone) with 0.5% BSA (EMD Millipore) and 0.001% sodium azide (Sigma)) (100 μL) was added and cells were transferred to 96-well “V” bottom plate. The cells were washed for 1500 RPM for 5 minutes at room temperature. The cell pellet was mixed with 100 μL chilled methanol by gently pipetting up and down, and cells were incubated for 30 minutes at 4° C. The cells were mixed with 100 mL of FACS buffer and washed for 1500 RPM for 5 minutes at room temperature. The cell pellets were mixed with 50 mL of FACS buffer containing 4 mL of pSTAT4 (BD Bioscience) and pSTAT5 antibodies (BD Bioscience) followed by incubation for 30 minutes at room temperature in the dark. The cells were mixed with 100 mL of FACS buffer and washed for 1500 RPM for 5 minutes at room temperature. The cell pellets were mixed with 50 mL of FACS buffer and cells were analyzed by flow cytometry (Celesta-BD Bioscience). FIG. 165 shows that incubation of NK cells with 18t15-12s induced an increase in pSTAT4 and pSTAT5 (plotted data, normalized fold-change).

[1364] A set of experiments was performed to determine the effect of 18t15-12s or a mixture of cytokines (e.g., IL12, IL18, and IL-15) on oxygen consumption rate (OCR) and extracellular acidification rate (ECAR) on NK cells purified from human blood. OCR and ECAR were measured by a Seahorse XF96 Analyzer. In these experiments, fresh human NK cells were isolated from human leukocytes via negative selection using the RosetteSep/human NK cell reagent (StemCell Technologies). Freshly purified NK cells were stimulated overnight (16 h) with either 18t15-12s (100 nM) or a mixture of rhIL12 (10 ng/mL), rhIL18 (50 ng/mL), and rhIL-15 (50 ng/mL) cytokines as a control. The next day, the cells were washed, counted, and equal numbers of cells were plated in buffered Seahorse media. Glucose, oligomycin, and 2DG solutions were prepared at 10× concentration in buffered Seahorse medium and injected in port A, B, and C of the calibration plate. FIG. 166 shows OCR (left) and ECAR (right) data from two individual donors. Overnight stimulation of NK cells with 18t15-12s resulted in an increase in basal ECAR and OCR levels. Addition of glucose and oligomycin further showed enhanced glycolysis and glycolytic capacity, respectively, of NK cells stimulated with 18t15-12s overnight. NK cells treated overnight with media alone or a mixture of IL12, IL18, and IL-15 were used for comparison.

### Example 64: Stimulation of NK Cells In Vivo by 2t2 and/or TGFRt15-TGFRs

[1365] A set of experiments was performed to determine the effect of the 2t2 construct on immune stimulation in C57BL/6 mice. In these experiments, C57BL/6 mice were subcutaneously treated with control solution (PBS) or 2t2 at 0.1, 0.4, 2, and 10 mg/kg. Treated mice were euthanized 3 days post-treatment. Spleen weight was measured and single splenocyte suspensions were prepared. Splenocytes suspensions were stained with conjugated anti-CD4, anti-CD8, and anti-NK1.1 (NK) antibodies. The percentage of CD4⁺ T cells, CD8⁺ T cells, and NK cells, and CD25 expression on lymphocyte subsets were analyzed by flow cytometry. FIG. 167A shows that 2t2 was effective at expanding splenocytes based on spleen weight especially at a dose level of 0.1-10 mg/kg. Following treatment, the percentage of CD8⁺ T cells were higher in 2t2-treated mice compared to control-treated mice at 2 and 10 mg/kg (FIG. 167B). The percentage of NK cells were also higher in 2t2-treated mice compared to control-treated mice at all doses of 2t2 tested (FIG. 167B). Additionally, 2t2 significantly upregulated CD25 expression by CD4⁺ T cells, but not CD8⁺ T cells and NK cells following treatment at 0.4 to 10 mg/kg (FIG. 167C).

[1366] A set of experiments was performed to determine the effect of the TGFRt15-TGFRs construct on immune stimulation in C57BL/6 mice. In these experiments, C57BL/6 mice were subcutaneously treated with control solution (PBS) or TGFRt15-TGFRs at 0.3, 1, 3, and 10 mg/kg. The treated mice were euthanized 4 days post-treatment. Spleen weight was measured and single splenocyte suspensions were prepared. The splenocytes suspensions were stained with conjugated anti-CD4, anti-CD8, and anti-NK1.1 (NK) antibodies. The percentage of CD4⁺ T cells, CD8⁺ T cells, and NK cells were analyzed by flow cytometry. FIG. 168A shows that spleen weight in mice treated with TGFRt15-TGFRs increased with increasing dosage of TGFRt15-TGFRs. Additionally, spleen weight in mice treated with 1 mg/kg, 3 mg/kg, and 10 mg/kg of TGFRt15-TGFRs were higher as compared to mice treated with the control solution. FIG. 168B shows that the percentages of CD8⁺ T cells and NK cells both increased with increasing dosage of TGFRt15-TGFRs. Specifically, the percentages of CD8⁺ T cells were higher in mice treated with 0.3 mg/kg, 3 mg/kg, and 10 mg/kg of TGFRt15-TGFRs compared to control-treated mice, and the percentages of NK cells were higher in mice treated with 0.3 mg/kg, 1 mg/kg, 3 mg/kg, and 10 mg/kg of TGFRt15-TGFRs compared to control-treated mice.

[1367] A set of experiments was performed to determine the effect of the TGFRt15-TGFRs construct or 2t2 construct on immune stimulation in ApoE^{-/-} mice fed with a Western diet. In these experiments, 6-week old female B6.129P2-ApoE^{tm1Unc}/J mice (Jackson Laboratory) were fed with a Western diet containing 21% fat, 0.15% cholesterol, 34.1% sucrose, 19.5% casein, and 15% starch (TD88137, Envigo Laboratories). After 8-weeks of the Western diet, the mice were injected subcutaneously with TGFRt15-TGFRs or 2t2 at 3 mg/kg. Three days post treatment, mice were fasted for 16 hours and then blood samples were collected through retro-orbital venous plexus puncture. The blood was mixed with 10 μL 0.5 M EDTA, and 20 μL blood was taken for lymphocyte subsets analysis. The red blood cells were lysed with ACK (0.15 M NH₄Cl, 1.0 mM KHCO₃, 0.1 mM Na₂EDTA, pH 7.4) and the lymphocytes were stained with anti-mouse CD8a and anti-mouse NK1.1 antibodies for 30 minutes at 4° C. in FACS staining buffer (1% BSA in PBS). The cells were washed once and analyzed with a BD FACS Celesta. For Treg staining, ACK treated blood lymphocytes were stained with anti-mouse CD4 and anti-mouse CD25 antibodies for 30 minutes at 4° C. in FACS staining buffer. The cells were washed once and resuspended in fixation/permeabilization working solution and incubated at room temperature for 60 minutes. The cells were washed once and resuspended in permeabilization buffer. The samples were centrifuged at 300-400×g for 5 minutes at room temperature and the supernatant was then discarded. The cell pellet was resuspended in residual volume and the volume adjusted to about 100 μL with 1× permeabilization buffer. Anti-Foxp3 antibody was added to the cells, and the cells were incubated for 30 minutes at room temperature. Permeabilization buffer (200 μL) was added to the cells, and the cells were centrifuged at 300-400×g for 5 minutes at room temperature. The cells were resuspended in flow cytometry staining buffer and analyzed on a flow cytometer. FIGS. 169B-169C show that treatment with TGFRt15-TGFRs and 2t2 increased the percentage of NK cells and CD8⁺ T cells in ApoE^{-/-} mice fed with Western diet. FIG. 169A shows that treatment with 2t2 also increased the percentage of Treg cells.

### Example 65: Induction of Proliferation of Immune Cells In Vivo

[1368] A set of experiments was performed to determine the effect of the 2t2 construct on immune cell stimulation in C57BL/6 mice. In these experiments, C57BL/6 mice were subcutaneously treated with control solution (PBS) or 2t2 at 0.1, 0.4, 2, and 10 mg/kg. Treated mice were euthanized 3 days post-treatment. Spleen weight was measured and single splenocyte suspensions were prepared. The splenocyte suspensions were stained with conjugated anti-CD4, anti-CD8, and anti-NK1.1 (NK) antibodies. The percentage of CD4⁺ T cells, CD8⁺ T cells, and NK cells were analyzed by flow cytometry. FIG. 170A shows that 2t2 treatment was effective at expanding splenocytes based on spleen weight especially at 0.1-10 mg/kg. The percentage of CD8⁺ T cells was higher compared to control-treated mice at 2 and 10 mg/kg (FIG. 170B). Additionally, the percentage of NK cells was higher compared to control-treated mice at all doses of 2t2 tested (FIG. 170B). These results demonstrate that 2t2 treatment was able to induce proliferation of CD8⁺ T cells and NK cells in C57BL/6 mice.

[1369] A set of experiments was performed to determine the effect of the TGFRt15-TGFRs construct on immune stimulation in C57BL/6 mice. In these experiments, C57BL/6 mice were subcutaneously treated with control solution (PBS) or TGFRt15-TGFRs at 0.1, 0.3, 1, 3, and 10 mg/kg. The treated mice were euthanized 4 days post-treatment. Spleen weight was measured and splenocyte suspensions were prepared. The splenocyte suspensions were stained with conjugated anti-CD4, anti-CD8, and anti-NK1.1 (NK) antibodies. The cells were additionally stained for proliferation marker Ki67. FIG. 171A shows that spleen weight in mice treated with TGFRt15-TGFRs increased with increasing dosage of TGFRt15-TGFRs. Additionally, spleen weight in mice treated with 1 mg/kg, 3 mg/kg, and 10 mg/kg of TGFRt15-TGFRs was higher as compared to mice treated with just the control solution. The percentages of CD8⁺ T cells and NK cells both increased with increasing dosage of TGFRt15-TGFRs (FIG. 171B). Finally, TGFRt15-TGFRs significantly upregulated expression of cell proliferation marker Ki67 in both CD8⁺ T cells and NK cells at all doses of TGFRt15-TGFRs tested. These results demonstrate that TGFRt15-TGFRs treatment induced proliferation of both CD8⁺ T cells and NK cells in C57BL/6 mice.

[1370] A set of experiments was performed to determine the effect of the TGFRt15-TGFRs construct or the 2t2 construct on immune stimulation in ApoE^{-/-} mice fed with a Western diet. In these experiments, 6-week old female B6.129P2-ApoE^{tm1Unc}/J mice (Jackson Laboratory) were fed with a Western diet containing 21% fat, 0.15% cholesterol, 34.1% sucrose, 19.5% casein, and 15% starch (TD88137, Envigo Laboratories). After 8-week of the Western diet, the mice were injected subcutaneously with TGFRt15-TGFRs or 2t2 at 3 mg/kg. Three days post-treatment, the mice were fasted for 16 hours and then blood samples were collected through retro-orbital venous plexus puncture. The blood was mixed with 10 μL 0.5 M EDTA and 20 μL blood was taken for lymphocyte subsets analysis. The red blood cells were lysed with ACK (0.15 M NH₄Cl, 1.0 mM KHCO₃, 0.1 mM Na₂EDTA, pH 7.4) and the lymphocytes were stained with anti-mouse CD8a and anti-mouse NK1.1 antibodies for 30 minutes at 4° C. in FACS staining buffer (1% BSA in PBS). The cells were washed once and resuspended in Fixation Buffer (BioLegend Cat #420801) for 20 minutes at room temperature. The cells were centrifuged at 350×g for 5 minutes, the fixed cells were resuspended in Intracellular Staining Permeabilization Wash Buffer (BioLegend Cat #421002) and then centrifuged at 350×g for 5 minutes. The cells were then stained with anti-Ki67 antibody for 20 minutes at RT. The cells were washed twice with Intracellular Staining Permeabilization Wash Buffer and centrifuged at 350×g for 5 minutes. The cells were then resuspended in FACS staining buffer. Lymphocyte subsets were analyzed with a BD FACS Celesta. As described in FIG. 172A, treatment of ApoE^{-/-} mice with TGFRt15-TGFRs induced proliferation (Ki67-positive staining) in NK and CD8⁺ T cells. Additionally, FIG. 172B shows treatment of ApoE^{-/-} mice with 2t2 also induced proliferation (Ki67-positive staining) in NK and CD8⁺ T cells.

[1371] A set of experiments was performed to determine the effect 7t15-21s+anti-TF antibody-expanded NK cells in NSG mice following treatment with 7t15-21s, TGFRt15-TGFRs, and 2t2. In these experiments, fresh human leukocytes were obtained from the blood bank and CD56⁺ NK cells were isolated with the RosetteSep/human NK cell reagent (StemCell Technologies). The purity of NK cells was >90% and confirmed by staining with CD56-BV421, CD16-BV510, CD25-PE, and CD69-APCFire750 antibodies (BioLegend). The cells were counted and resuspended in 2×10⁶/mL in a 24-well flat-bottom plate in 2 mL of complete media (RPMI 1640 (Gibco) supplemented with 2 mM L-glutamine (Thermo Life Technologies), penicillin (Thermo Life Technologies), streptomycin (Thermo Life Technologies), and 10% FBS (Hyclone)). The cells were stimulated with: 7t15-21s (100 nM) and anti-TF antibody (50 nM) for 15 days. After every 2 days, the cells were resuspended at 2×10⁶/mL with fresh media containing 100 nM 7t15-21s and 50 nM of anti-TF antibody. As the volume of the cultures increased, the cells were transferred to higher volume flasks. The cells were counted using trypan blue to access the fold-expansion. 7t15-21s+anti-TF antibody-expanded NK cells were washed three times in warm HBSS Buffer (Hyclone) at 1000 RPM for 10 minutes at room temperature. The 7t15-21s+anti-TF antibody-expanded-NK cells were resuspended in 10×10⁶/0.2 mL HBSS buffer and injected intravenously into the tail vein of NSG mice (NOD scid gamma mouse) (Jackson Laboratories). The transferred NK cells were supported every 48 hours with either 7t15-21s (10 ng/dose, i.p.), TGFRt15-TGFRs (10 ng/dose, i.p.) or 2t2 (10 ng/dose, i.p.) for up to 21 days. Engraftment and persistence of the human 7t15-21s+anti-TF antibody-expanded NK cells were measured every week in blood staining for hCD45, mCD45, hCD56, hCD3, and hCD16 antibodies by flow cytometry (Celesta-BD Bioscience) (Data represent 3 mice per group). FIG. 173 indicates that treatment of mice bearing adoptively-transferred 7t15-21s+anti-TF antibody-expanded NK cells with 7t15-21s-, TGFRt15-TGFRs-, or 2t2-induced expansion and persistence of the adoptively transferred NK cells compared to control treated mice.

### Example 66: NK-Mediated Cytotoxicity Following Treatment with Single-Chain Constructs or Multi-Chain Constructs

[1372] A set of experiments was performed to determine if treatment of NK cells with TGFRt15-TGFRs enhanced cytotoxicity of NK cells. In these experiments, Human Daudi B lymphoma cells were labeled with CellTrace Violet (CTV) and used as tumor target cells. Mouse NK effector cells were isolated with NK1.1-positive selection using a magnetic cell sorting method (Miltenyi Biotec) of C57BL/6 female mouse spleens 4 days post TGFRt15-TGFRs subcutaneous treatment at 3 mg/kg. Human NK effector cells were isolated from peripheral blood mononuclear cells derived from human blood buffy coats with the RosetteSep/human NK cell reagent (Stemcell Technologies). The target cells (Human Daudi B lymphoma cells) were mixed with effector cells (either mouse NK effector cells or human NK effector cells) in the presence of 50 nM TGFRt15-TGFRs or in the absence of TGFRt15-TGFRs (control) and incubated at 37° C. for 44 hours for mouse NK cells and for 20 hours for human NK cells. Target cell (Daudi) viability was assessed by analysis of propidium iodide-positive, CTV-labeled cells using flow cytometry. The percentage of Daudi inhibition was calculated using the formula (1-viable tumor cell number in experimental sample/viable tumor cell number in the sample without NK cells)×100. FIG. 174 shows that mouse (FIG. 174A) and human (FIG. 174B) NK cells had significantly stronger cytotoxicity against Daudi B cells following NK cell activation with TGFRt15-TGFRs than in the absence of TGFRt15-TGFRs activation.

[1373] A set of experiments was performed to determine antibody-dependent cellular cytotoxicity (ADCC) of mouse and human NK cells following treatment with TGFRt15-TGFRs. In these experiments, human Daudi B lymphoma cells were labeled with CellTrace Violet (CTV) and used as tumor target cells. Mouse NK effector cells were isolated with NK1.1-positive selection using a magnetic cell sorting method (Miltenyi Biotec) of C57BL/6 female mouse spleens 4 days post-TGFRt15-TGFRs subcutaneous treatment at 3 mg/kg. Human NK effector cells were isolated from peripheral blood mononuclear cells derived from human blood buffy coats with the RosetteSep/human NK cell reagent (Stemcell Technologies). The target cells (Daudi B cells) were mixed with effector cells (either mouse NK effector cells or human NK effector cells) in the presence of anti-CD20 antibody (10 nM Rituximab, Genentech) and in the presence of 50 nM TGFRt15-TGFRs, or in the absence of TGFRt15-TGFRs (control) and incubated at 37° C. for 44 hours for mouse NK cells and for 20 hours for human NK cells. The Daudi B cells express the CD20 targets for the anti-CD20 antibody. Target cell viability was assessed after incubation by analysis of propidium iodide-positive, CTV-labeled target cells using flow cytometry. The percentage of Daudi inhibition was calculated using the formula (1-viable tumor cell number in experimental sample/viable tumor cell number in the sample without NK cells)×100. FIG. 175 shows that mouse NK cells (FIG. 175A) and human NK cells (FIG. 175B) had stronger ADCC activity against Daudi B cells following NK cell activation with TGFRt15-TGFRs than in the absence of TGFRt15-TGFRs activation.

[1374] A set of experiments was performed to determine cytotoxicity of TGFRt15-TGFRs-activated mouse NK cells towards senescent B16F10 melanoma cells. In these experiments, mouse NK cells were activated in vivo by injecting C57BL/6 mice with 10 mg/kg of TGFRt15-TGFRs for 4 days followed by isolation of splenic NK cells. The NK cells were then expanded in vitro for 7 days in the presence of 100 nM 2t2. The B16F10 senescent target cells (B16F10-SNC) were labelled with CellTrace Violet (CTV) and incubated at different Effector:Target (E:T) ratios with the activated mouse NK effector cells for 16 hours. The cells were trypsinized, washed, and resuspended in complete media containing propidium iodide (PI) solution. The cytotoxicity of the TGFRt15-TGFRs/2t2-activated NK cells against the senescent cell targets was accessed by flow cytometry based on PI staining of the CTV-labeled cells. The findings demonstrate that in vivo activation of NK cells with TGFRt15-TGFRs followed by in vitro expansion and activation with 2t2 resulted in increased killing of senescent melanoma tumor cells by the NK cells (FIG. 176).

### Example 67: Treatment of Cancer, Diabetes, and Atherosclerosis

[1375] A set of experiments was performed to assess antitumor activity of TGFRt15-TGFRs plus anti-TRP1 antibody (TA99) in combination with chemotherapy in a melanoma mouse model. In these experiments, C57BL/6 mice were subcutaneously injected with 0.5×10⁶ B16F10 melanoma cells. The mice were treated with three doses of chemotherapy docetaxel (10 mg/kg) (DTX) on day 1, day 4, and day 7, followed by treatment with single dose of combination immunotherapy TGFRt15-TGFRs (3 mg/kg)+anti-TRP1 antibody TA99 (200 μg) on day 9. FIG. 177A shows a schematic of the treatment regimen. Tumor growth was monitored by caliper measurement, and tumor volume was calculated using the formula V=(L×W²)/2, where L is the largest tumor diameter and W is the perpendicular tumor diameter. FIG. 177B shows that treatment with DTX+TGFRt15-TGFRs+TA99 significantly reduced tumor growth compared to saline control and DTX treatment groups (N=10, ****p<0.001, Multiple t test analyses).

[1376] To assess immune cell subsets in the B16F10 tumor model, peripheral blood analysis was performed. In these experiments, C57BL/6 mice were injected with B16F10 cells and treated with DTX, DTX+TGFRt15-TGFRs+TA99, or saline. Blood was drawn from the submandibular vein of B16F10 tumor-bearing mice on days 2, 5, and 8 post-immunotherapy for the DTX+TGFRt15-TGFRs+TA99 group and day 11 post-tumor injection for the DTX and saline groups. RBCs were lysed in ACK lysis buffer and the lymphocytes were washed and stained with anti-NK1.1, anti-CD8, and anti-CD4 antibodies. The cells were analyzed by flow cytometry (Celesta-BD Bioscience). FIGS. 177C-177E show that DTX+TGFRt15-TGFRs+TA99 treatment induced an increase in the percentage of NK cells and CD8⁺ T cells in the tumors compared to the saline and DTX treatment groups.

[1377] On day 17, total RNA was extracted from tumors of mire treated with saline. DTX or DTX+TGFRt15-TGFRs+TA99 using Trizol. Total RNA (1 μg) was used for cDNA synthesis using the QuantiTect Reverse Transcription Kit (Qiagen) Real-time PCR was carried out with CFX96 Detection System (Bio-Rad) using FAM-labeled predesigned primers for senescence cell markers, (F) p21 (G) DPP4 and (H) IL6. The housekeeping gene 18S ribosomal RNA was used as an internal control to normalize the variability in expression levels. The expression of each target mRNA relative to 18S rRNA was calculated based on Ct as 2^{-Δ(ΔCt)}, in which ΔCt=Ct_{target}−Ct_{18S}. The data is presented as fold-change as compared to saline control. FIG. 177F-177H show that DTX treatment induced an increase in senescent tumor cells that were subsequently reduced following treatment with TGFRt15-TGFRs+TA99 immunotherapy.

[1378] A set of experiments was performed to investigate amelioration of Western diet-induced hyperglycemia in ApoE^{-/-} mice by 2t2. In these experiments, 6-week old female B6.129P2-ApoE^{tm1Unc}/J mice (Jackson Laboratory) were fed with a Western diet containing 21% fat, 0.15% cholesterol, 34.1% sucrose, 19.5% casein, and 15% starch (TD88137, Envigo Laboratories). After 8-weeks of the Western diet, the mice were injected subcutaneously with TGFRt15-TGFRs or 2t2 at 3 mg/kg. Three days post-treatment, the mice were fasted for 16 hours and then blood samples were collected through retro-orbital venous plexus puncture. Blood glucose was detected with a glucose meter (OneTouch UltraMini) and GenUltimated test strips using a drop of fresh blood. As shown in FIG. 178A, 2t2 treatment significantly reduced hyperglycemia induced by the Western diet (p<0.04). The plasma insulin and resistin levels were analyzed with Mouse Rat Metabolic Array by Eve Technologies. HOMA-IR was calculated using the following formula: homeostatic model assessment-insulin resistance=Glucose (mg/dL)*Insulin (mU/mL)/405. As shown in FIG. 178B, both 2t2 and TGFRt15-TGFRs treatment reduced insulin resistance compared to the untreated group. Both 2t2 (p<0.02) and TGFRt15-TGFRs (p<0.05) reduced resistin levels significantly compared to the untreated group as shown in FIG. 178C, which may relate to the reduced insulin resistance induced by 2t2 and TGFRt15-TGFRs (Figure F3B).

### Example 68: Induction of Differentiation of NK Cells into Cytokine-Induced Memory Like NK Cells

[1379] A set of experiments was performed to assess the differentiation of NK cells into cytokine-induced memory like NK Cells (CIMK-NK Cells) after stimulation with 18t15-12s. In these experiments, fresh human leukocytes were obtained from the blood bank and CD56⁺ NK cells were isolated with the RosetteSep/human NK cell reagent (StemCell Technologies). The purity of NK cells was >90% and confirmed by staining with CD56-BV421, CD16-BV510, CD25-PE, and CD69-APCFire750 antibodies (BioLegend). The cells were counted and resuspended in 2×10⁶/mL in a 24-well flat-bottom plate in 2 mL of complete media (RPMI 1640 (Gibco) supplemented with 2 mM L-glutamine (Thermo Life Technologies), penicillin (Thermo Life Technologies), streptomycin (Thermo Life Technologies), and 10% FBS (Hyclone)). The cells were unstimulated (“No Spike”) or stimulated with 18t15-12s (100 nM) or a mixture of single cytokines including rhIL-15 (50 ng/mL) (Miltenyi), rhIL18 (50 ng/mL) (Invivogen), and rhIL-12 (10 ng/mL) (Peprotech) (“single cytokines”) at 37° C. and 5% CO₂ for 16 hrs. The next day, the cells were harvested, and washed two times with warm complete media at 1000 RPM for 10 minutes at room temperature. The cells were resuspended at 2×10⁶/mL in a 24-well flat-bottom plate in 2 mL of complete media with rhIL-15 (1 ng/mL). After every 2 days, half of the medium was replaced with fresh complete media containing rhIL-15.

[1380] To assess the change in memory phenotype of NK cells at day 7, the cells were stained with antibodies to cell-surface CD56, CD16, CD27, CD62L, NKp30, and NKp44 (BioLegend). After surface staining, the cells were washed (1500 RPM for 5 minutes at room temperature) in FACS buffer (1×PBS (Hyclone) with 0.5% BSA (EMD Millipore) and 0.001% sodium azide (Sigma)). After two washes, the cells were analyzed by flow cytometry (Celesta-BD Bioscience). FIG. 179 shows that incubation of NK cells with 18t15-12s resulted in an increase in the percentage of CD16⁺CD56⁺ NK cells expressing CD27, CD62L, and NKp44, and an increase in the levels (MFI) of NKp30 in CD16⁺CD56⁺ NK cells.

### Example 69. Upregulation of CD44 Memory T Cells

[1381] C57BL/6 mice were subcutaneously treated with TGFRt15-TGFRs or 2t2. The treated mice were euthanized and the single splenocyte suspensions were prepared 4 days (TGFRt15-TGFRs) or 3 days (2t2) following the treatment. The prepared splenocytes were stained with fluorochrome-conjugated anti-CD4, anti-CD8 and anti-CD44 antibodies and the percentages of CD44^{high} T cells in CD4⁺ T cells or CD8⁺ T cells were analyzed by flow cytometry. The results show that TGFRt15-TGFRs and 2t2 upregulated expression of the memory marker CD44 on CD4+ and CD8+ T cells (FIG. 180). These findings indicate that TGFRt15-TGFRs and 2t2 molecules were able to induce mouse T cells to differentiate into memory T cells.

### Example 70: Improvement of the Texture and/or Appearance and/or Hair

[1382] To examine the effect of 2t2 on hair regrowth, dorsal hair of C57BL6/J mice (Jackson Laboratory) was first shortened with clippers followed by application of depilatory cream (Nair) to the shaved region for a period of 30 seconds before wiping clean. After 4 hours, 2t2 (3 mg/kg, single dose), low dose recombinant IL-2 (25000 IU, 5 consecutive days, 1 dose/day), or PBS were administered subcutaneously. The mice were monitored for skin pigmentation related to hair regrowth and pictures were taken and analyzed using the Image J software. FIG. 181A shows skin pigmentation 10 days after depilation in PBS-, 2t2-, or IL-2-treated mice. FIG. 181B shows the percent pigmentation in each group of mice 10 days post-treatment as analyzed using the Image J software. The results showed that treatment of mice with 2t2 or IL-2 promoted hair regrowth following depilation compared to PBS-treated mice.

[1383] Dorsal hair of C57BL6/J mice (Jackson Laboratory) was first shortened with clippers before applying depilatory cream (Nair) to the shaved region for a period of exactly 30 seconds before wiping clean. After 4 hours, 2t2 (3 mg/kg, single dose), low dose recombinant IL-2 (25000 IU, 5 consecutive days, 1 dose/day) or PBS were administered subcutaneously. The mice were monitored for skin pigmentation related to hair regrowth and pictures were taken and analyzed using Image J software. FIG. 182 shows skin pigmentation 14 days after depilation in PBS-, 2t2-, or IL-2-treated mice. The results showed that treatment of mice with 2t2 or IL-2 promoted hair regrowth following depilation compared to the PBS-treated mice.

### Example 71: Tissue Factor Coagulation Assays Following Treatment with Single-Chain or Multi-Chain Chimeric Polypeptides

[1384] A set of experiments was performed to assess blood coagulation following treatment with single-chain or multi-chain chimeric polypeptides. To initiate the blood coagulation cascade pathway, tissue factor (TF) binds to Factor VIIa (FVIIa) to form a TF/FVIIa complex. The TF/FVIIa complex then binds Factor X (FX) and converts FX to FXa.

### Factor VIIa (FVIIa) Activity Assay

[1385] One assay to measure blood coagulation involves measuring Factor VIIa (FVIIa) activity. This type of assay requires the presence of tissue factor and calcium. The TF/FVIIa complex activity can be measured by a small substrate or by a natural protein substrate, for example, Factor X (FX). When FX is used as a substrate, phospholipids are also required for TF/FVIIa activity. In this assay, FVIIa activity is determined with FVIIa-specific chromogenic substrate S-2288 (Diapharma, West Chester, Ohio). The color change of the S-2288 substrate can be measured spectrophotometrically and is proportional to the proteolytic activity of FVIIa (e.g., the TF/FVIIa complex).

[1386] In these experiments, the FVIIa activity of the following groups were compared: the 219-amino acid extracellular domain of tissue factor domain (TF₂₁₉), a multi-chain chimeric polypeptide with a wild-type tissue factor domain, and a multi-chain chimeric polypeptide with a mutant tissue factor domain. The chimeric polypeptides containing mutant tissue factor molecules were constructed with mutations to the TF domain at amino acid sites: Lys20, Ile22, Asp58, Arg135, and Phe140.

[1387] In order to assess activity of FVIIa, FVIIa, and TF₂₁₉ or a TF₂₁₉-containing multi-chain chimeric polypeptide were mixed at an equal molar concentration (10 nM) in all wells of a 96-well ELISA plate in a total volume of 70 μL. After incubation for 10 minutes at 37° C., 10 μL of 8 mM S-2288 substrate was added to start the reaction. The incubation was then kept at 37° C. for 20 minutes. Finally, color change was monitored by reading absorbance at 405 nm. The OD values of different TF/VIIa complexes are shown in Table 1 and Table 2. Table 1 shows a comparison of TF₂₁₉, 21t15-21s wild-type (WT) and 21t15-21s mutant (Mut). Table 2 shows a comparison of TF₂₁₉, 21t15-TGFRs wild-type (WT), and 21t15-TGFRs mutant (Mut). These data show that TF₂₁₉-containing multi-chain chimeric polypeptides (e.g., 21t15-21s-WT, 21t15-21s-Mut, 21t15-TGFRS-WT, and 21t15-TGFRS-Mut) have lower FVIIa activity than TF₂₁₉ when the chromogenic S-2288 was used as a substrate. Notably, the multi-chain chimeric polypeptides containing TF₂₁₉ mutations showed much lower FVIIa activity when compared to multi-chain chimeric polypeptides containing wild type TF₂₁₉.

TABLE 1
FVIIa activity

| Molecule | OD value at 405 nm |
|---|---|
| TF₂₁₉ | 0.307 |
| 21t15/21S-WT | 0.136 |
| 21t15/21S-Mut | 0.095 |

WT: wild type of TF₂₁₉, Mut: TF₂₁₉ containing mutations.

TABLE 2
FVIIa activity

| Molecule | OD value at 405 nm |
|---|---|
| TF₂₁₉ | 0.345 |
| 21t15/TGFRS-WT | 0.227 |
| 21t15/TGFRS-Mut | 0.100 |

WT: wild type of TF₂₁₉, Mut: TF₂₁₉ containing mutations.

### Factor X (FX) Activation Assay

[1388] An additional assay to measure blood coagulation involves measuring activation of Factor X (FX). Briefly, TF/VIIa activates blood coagulation Factor X (FX) to Factor Xa (FXa) in the presence of calcium and phospholipids. TF₂₄₃, which contains the transmembrane domain of TF, has much higher activity in activating FX to FXa than TF₂₁₉, which does not contain the transmembrane domain. TF/VIIa dependent activation of FX is determined by measuring FXa activity using an FXa-specific chromogenic substrate S-2765 (Diapharma, West Chester, Ohio). The color change of S-2765 can be monitored spectrophotometrically and is proportional to the proteolytic activity of FXa.

[1389] In these experiments, FX activation with a multi-chain chimeric polypeptide (18t15-12s, mouse (m)21t15, 21t15-TGFRs, and 21t15-7s) was compared with a positive control (Innovin) or TF₂₁₉. TF₂₁₉ (or TF₂₁₉-containing multi-chain chimeric polypeptides)/FVIIa complexes were mixed at an equal molar concentration (0.1 nM each) in a volume of 50 μL in round bottom wells of a 96-well ELISA plate, after which 10 μL of 180 nM FX was added. After 15 minutes of incubation at 37° C., during which time FX was converted to FXa, 8 μL of 0.5 M EDTA (which chelates calcium and thus terminates FX activation by TF/VIIa) was added to each well to stop FX activation. Next, 10 μL of 3.2 mM S-2765 substrate was added to the reaction mixture. Immediately, the plate absorbance was measured at 405 nm and was recorded as the absorbance at time 0. The plate was then incubated for 10-20 minutes at 37° C. The color change was monitored by reading absorbance at 405 nm following the incubation. Results of FX activation as measured by FXa activity using chromogenic substrate S-2765 are shown in FIG. 183. In this experiment, Innovin, which is a commercial prothrombin reagent containing lipidated recombinant human TF₂₄₃, was used as a positive control for FX activation. Innovin was reconstituted with purified water to about 10 nM of TF₂₄₃. Next, 0.1 nM TF/VIIa complex was made by mixing an equal volume of 0.2 nM of FVIIa with 0.2 nM of Innovin. Innovin demonstrated very potent FX activation activity, while TF₂₁₉ and TF₂₁₉-containing multi-chain chimeric polypeptides had very low FX activation activity, confirming that TF₂₁₉ is not active in a TF/FVIIa complex for activating natural substrate FX in vivo.

### Prothrombin Time Test

[1390] A third assay to measure blood coagulation is the prothrombin time (PT) test, which measures blood clotting activity. Here, the PT test was performed using commercially available normal human plasma (Ci-Trol Coagulation Control, Level I). For a standard PT test, clot reactions were initiated by addition of Innovin, a lipidated recombinant human TF₂₄₃, in the presence of calcium. Clotting time was monitored and reported by STart PT analyzer (Diagnostica Stago, Parsippany, N.J.). PT assays were started by injecting 0.2 mL of various dilutions of Innovin diluted in PT assay buffer (50 mM Tris-HCl, pH 7.5, 14.6 mM CaCl₂), 0.1% BSA) into cuvettes containing 0.1 mL of normal human plasma prewarmed at 37° C. In the PT assay, shorter PT time (clotting time) indicates a higher TF-dependent clotting activity while longer PT (clotting time) means lower TF-dependent clotting activity.

[1391] As seen in FIG. 184, addition of different amounts of Innovin (e.g., Innovin reconstituted with purified water equivalent to 10 nM of lipidated recombinant human TF₂₄₃ was considered to be 100% Innovin) to the PT assay demonstrated a dose-response relationship, where lower concentrations of TF₂₄₃ resulted in a longer PT time (lower clotting activity). For example, 0.001% Innovin had a PT time greater than 110 seconds, which was almost the same as buffer alone.

[1392] In another experiment, the PT test was conducted on TF₂₁₉ and multi-chain chimeric polypeptides including: 18t15-12s, 7t15-21s, 21t15-TGFRs-WT, and 21t15-TGFRs-Mut. FIG. 185 show that TF₂₁₉ and TF₂₁₉-containing multi-chain chimeric polypeptides (at a concentration of 100 nM) had prolonged PT times indicating extremely low or no clotting activity.

[1393] Studies were also conducted to evaluate whether incubating the multi-chain chimeric polypeptides in the presence of other cells carrying receptors for the cytokine components of the multi-chain chimeric polypeptide (32Dβ or human PBMCs) would affect the clotting time in the PT assay. To examine whether cells that express IL-15 receptor (32Dβ cells) or IL-15 and IL-21 receptors (PBMCs) would bind IL-15-containing multi-chain chimeric polypeptides to mimic natural TF as a cellular FVIIa receptor, TF₂₁₉-containing multi-chain chimeric polypeptides (at a concentration of 100 nM for each molecule) were diluted in the PT assay buffer and preincubated with 32Dβ cells (at 2×10⁵ cells/mL) or PBMC (at 1×10⁵ cells/mL) for 20-30 minutes at room temperature. The PT assay was then conducted as described above. FIGS. 186 and 187 shows that TF₂₁₉ and TF₂₁₉-containing multi-chain chimeric polypeptides mixed with 32Dβ cells (FIG. 186) or PBMC (FIG. 187) at a final concentration of 100 nM had prolonged PT times similar to 0.001-0.01% Innovin (equivalent to 0.1 pM to 1.0 pM of TF₂₄₃). Expressed in percentage of relative TF₂₄₃ activity, TF₂₁₉-containing multi-chain chimeric polypeptides had 100,000 to 1,000,000 times lower TF dependent clotting activity when compared to Innovin. This demonstrated that TF₂₁₉-containing multi-chain chimeric polypeptides had extremely low or no TF-dependent clotting activity, even while the molecules were bound to an intact cell membrane surface, such as 32Dβ or PBMCs.

### Example 72: Characterization of 7t15-21s137L (Long Version)

[1394] The nucleic acid sequence of the 7t15 construct (including signal peptide sequence) is as follows (SEQ ID NO: 210):

(Signal peptide)
ATGAAGTGGGTGACCTTCATCAGCCTGCTGTTCCTGTTCTCCAGCGCCT
ACTCC
(Human IL7)
GATTGCGACATCGAGGGCAAGGACGGCAAGCAGTACGAGAGCGTGCTGA
TGGTGTCCATCGACCAGCTGCTGGACAGCATGAAGGAGATCGGCTCCAA
CTGCCTCAACAACGAGTTCAACTTCTTCAAGCGGCACATCTGCGACGCC
AACAAGGAGGGCATGTTCCTGTTCAGGGCCGCCAGGAAACTGCGGCAGT
TCCTGAAGATGAACTCCACCGGCGACTTCGACCTGCACCTGCTGAAGGT
GTCCGAGGGCACCACCATCCTGCTGAACTGCACCGGACAGGTGAAGGGC
CGGAAACCTGCTGCTCTGGGAGAGGCCCAACCCACCAAGAGCCTGGAGG
AGAACAAGTCCCTGAAGGAGCAGAAGAAGCTGAACGACCTGTGCTTCCT
GAAGAGGCTGCTGCAGGAGATCAAGACCTGCTGGAACAAGATCCTGATG
GGCACCAAGGAGCAT
(Human Tissue Factor 219)
AGCGGCACAACCAACACAGTCGCTGCCTATAACCTCACTTGGAAGAGCA
CCAACTTCAAAACCATCCTCGAATGGGAACCCAAACCCGTTAACCAAGT
TTACACCGTGCAGATCAGCACCAAGTCCGGCGACTGGAAGTCCAAATGT
TTCTATACCACCGACACCGAGTGCGATCTCACCGATGAGATCGTGAAAG
ATGTGAAACAGACCTACCTCGCCCGGGTGTTTAGCTACCCCGCCGGCAA
TGTGGAGAGCACTGGTTCCGCTGGCGAGCCTTTATACGAGAACAGCCCC
GAATTTACCCCTTACCTCGAGACCAATTTAGGACAGCCCACCATCCAAA
GCTTTGAGCAAGTTGGCACAAAGGTGAATGTGACAGTGGAGGACGAGCG
GACTTTAGTGCGGCGGAACAACACCTTTCTCAGCCTCCGGGATGTGTTC
GGCAAAGATTTAATCTACACACTGTATTACTGGAAGTCCTCTTCCTCCG
GCAAGAAGACAGCTAAAACCAACACAAACGAGTTTTTAATCGACGTGGA
TAAAGGCGAAAACTACTGTTTCAGCGTGCAAGCTGTGATCCCCTCCCGG
ACCGTGAATAGGAAAAGCACCGATAGCCCCGTTGAGTGCATGGGCCAAG
AAAAGGGCGAGTTCCGGGAG
(Human IL-15)
AACTGGGTGAACGTCATCAGCGATTTAAAGAAGATCGAAGATTTAATTC
AGTCCATGCATATCGACGCCACTTTATACACAGAATCCGACGTGCACCC
CTCTTGTAAGGTGACCGCCATGAAATGTTTTTTACTGGAGCTGCAAGTT
ATCTCTTTAGAGAGCGGAGACGCTAGCATCCACGACACCGTGGAGAATT
TAATCATTTTAGCCAATAACTCTTTATCCAGCAACGGCAACGTGACAGA
GTCCGGCTGCAAGGAGTGCGAAGAGCTGGAGGAGAAGAACATCAAGGAG
TTTCTGCAATCCTTTGTGCACATTGTCCAGATGTTCATCAATACCTCC

[1395] The amino acid sequence of 7t15 fusion protein (including the leader sequence) is as follows (SEQ ID NO: 209):

(Signal peptide)
MKWVTFISLLFLFSSAYS
(Human IL7)
DCDIEGKDGKQYESVLMVSIDQLLDSMKEIGSNCLNNEFNFFKRHICDA
NKEGM
FLFRAARKLRQFLKMNSTGDFDLHLLKVSEGTTILLNCTGQVKGRKPAA
LGEAQPTKSLEENKSLKEQKKLNDLCFLKRLLQEIKTCWNKILMGTKEH
(Human Tissue Factor 219)
SGTTNTVAAYNLTWKSTNFKTILEWEPKPVNQVYTVQISTKSGDWKSKC
FYTTDTECDLTDEIVKDVKQTYLARVFSYPAGNVESTGSAGEPLYENSP
EFTPYLETNLGQPTIQSFEQVGTKVNVTVEDERTLVRRNNTFLSLRDVF
GKDLIYTLYYWKSSSSGKKTAKTNTNEFLIDVDKGENYCFSVQAVIPSR
TVNRKSTDSPVECMGQEKGEFRE
(Human IL-15)
NWVNVISDLKKIEDLIQSMHIDATLYTESDVHPSCKVTAMKCFLLELQV
ISLESGDASIHDTVENLIILANNSLSSNGNVTESGCKECEELEEKNIKE
FLQSFVHIVQMFINTS
The nucleic acid sequence of the 21s137L construct
(including signal peptide sequence) is as follows
(SEQ ID NO: 331): (Signal peptide)
ATGAAGTGGGTGACCTTCATCAGCCTGCTGTTCCTGTTCTCCAGCGCCT
ACTCC
(Human IL-21)
CAGGGCCAGGACAGGCACATGATCCGGATGAGGCAGCTCATCGACATCG
TCGACCAGCTGAAGAACTACGTGAACGACCTGGTGCCCGAGTTTCTGCC
TGCCCCCGAGGACGTGGAGACCAACTGCGAGTGGTCCGCCTTCTCCTGC
TTTCAGAAGGCCCAGCTGAAGTCCGCCAACACCGGCAACAACGAGCGGA
TCATCAACGTGAGCATCAAGAAGCTGAAGCGGAAGCCTCCCTCCACAAA
CGCCGGCAGGAGGCAGAAGCACAGGCTGACCTGCCCCAGCTGTGACTCC
TACGAGAAGAAGCCCCCCAAGGAGTTCCTGGAGAGGTTCAAGTCCCTGC
TGCAGAAGATGATCCATCAGCACCTGTCCTCCAGGACCCACGGCTCCGA
GGACTCC
(Human IL-15R a sushi domain)
ATTACATGCCCCCCTCCCATGAGCGTGGAGCACGCCGACATCTGGGTGA
AGAGCTATAGCCTCTACAGCCGGGAGAGGTATATCTGTAACAGCGGCTT
CAAGAGGAAGGCCGGCACCAGCAGCCTCACCGAGTGCGTGCTGAATAAG
GCTACCAACGTGGCTCACTGGACAACACCCTCTTTAAAGTGCATCCGG
((G4S)3 linker)
GGCGGTGGAGGATCCGGAGGAGGTGGCTCCGGCGGCGGAGGATCT
(Human CD137L)
CGCGAGGGTCCCGAGCTTTCGCCCGACGATCCCGCCGGCCTCTTGGACC
TGCGGCAGGGCATGTTTGCGCAGCTGGTGGCCCAAAATGTTCTGCTGAT
CGATGGGCCCCTGAGCTGGTACAGTGACCCAGGCCTGGCAGGCGTGTCC
CTGACGGGGGGCCTGAGCTACAAAGAGGACACGAAGGAGCTGGTGGTGG
CCAAGGCTGGAGTCTACTATGTCTTCTTTCAACTAGAGCTGCGGCGCGT
GGTGGCCGGCGAGGGCTCAGGCTCCGTTTCACTTGCGCTGCACCTGCAG
CCACTGCGCTCTGCTGCTGGGGCCGCCGCCCTGGCTTTGACCGTGGACC
TGCCACCCGCCTCCTCCGAGGCTCGGAACTCGGCCTTCGGTTTCCAGGG
CCGCTTGCTGCACCTGAGTGCCGGCCAGCGCCTGGGCGTCCATCTTCAC
ACTGAGGCCAGGGCACGCCATGCCTGGCAGCTTACCCAGGGCGCCACAG
TCTTGGGACTCTTCCGGGTGACCCCCGAAATCCCAGCCGGACTCCCTTC
ACCGAGGTCGGAA

[1396] The amino acid sequence of 21s137L fusion protein (including the leader sequence) is as follows (SEQ ID NO: 332):

(Signal peptide)
MKWVTFISLLFLFSSAYS
(Human IL-21)
[sequence omitted]
(Human IL-15R a sushi domain)
ITCPPPMSVEHADIWVKSYSLYSRERYICNSGFKRKAGTSSLTECVLNK
ATNVAHWTTPSLKCIR
((G4S)3 linker)
GGGGSGGGGSGGGGS
(Human CD137L)
REGPELSPDDPAGLLDLRQGMFAQLVAQNVLLIDGPLSWYSDPGLAGVS
LTGGLSYKEDTKELVVAKAGVYYVFFQLELRRVVAGEGSGSVSLALHLQ
PLRSAAGAAALALTVDLPPASSEARNSAFGFQGRLLHLSAGQRLGVHLH
TEARARHAWQLTQGATVLGLFRVTPEIPAGLPSPRSE

[1397] The following experiment was conducted to evaluate whether the CD137L portion in 7t15-21s137L was intact to bind to CD137 (4.1BB). On day 1, a 96-well plate was coated with 100 μL (2.5 μg/mL) of GAH IgG Fc (G-102-C, R&D Systems) in R5 (coating buffer), overnight. On day 2, the plates were washed three times and blocked with 300 μL of 1% BSA in PBS at 37° C. for 2 hrs. 10 ng/ml of 4.1BB/Fc (838-4B, R&D Systems) was added at 100 μl/well for 2 hrs at room temperature. Following three washes, 7t15-21s137L (long version) or 7t15-21s137Ls (short version) was added starting at 10 nM, or recombinant human 4.1BBL starting at 180 ng/mL, with 1/3 dilution, followed by incubation at 4° C. overnight. On day 3, the plates were washed three times, and 500 ng/mL of biotinylate-goat anti-human 4.1BBL (BAF2295, R&D Systems) was applied at 100 μL per well, followed by incubation at RT for 2 hrs. The plates were washed three times, and incubated with 0.25 μg/mL of HRP-SA (Jackson ImmuneResearch) at 100 μL per well for 30 min. The plates were then washed three times, and incubated with 100 μL of ABTS for 2 mins at RT. The results were read at 405 nm. As shown in FIG. 188, both 7t15-21s137L (long version) and 7t15-21s137L (short version) could interact with 4.1BB/Fc (dark diamond and gray square) compared to the recombinant human 4.1BB ligand (rhCD137L, light gray star). 7t15-21s137L (long version) (dark diamond) interacted better with 4.1BB/Fc as compared to 7t15-21s137L (short version) (gray square).

[1398] The following experiments were conducted to evaluate whether the components IL7, IL21, IL15, and 4.1BBL in 7t15-21s137L (long version) were intact to be detected by the individual antibody using ELISA. A 96-well plate was coated with 100 μL (4 μg/mL) of anti-TF (human IgG1) in R5 (coating buffer) and incubated at RT for 2 hrs. The plates were washed three times, and blocked with 100 μL of 1% BSA in PBS. Purified 7t15-21s137L (long version) was added starting at 10 nM, and at 1/3 dilution, followed by incubation at RT for 60 min. The plates were washed three times, and 500 ng/mL of biotinylate-anti-IL7 (506602, R&D Systems), 500 ng/mL of biotinylate-anti-IL21 (13-7218-81, R&D Systems), 50 ng/mL of biotinylate-anti-IL15 (BAM247, R&D Systems), or 500 ng/ml of biotinylate-goat anti-human 4.1BBL (BAF2295, R&D Systems) was added per well and incubated at room temperature for 60 min. The plates were washed three times and incubated with 0.25 μg/mL of HRP-SA (Jackson ImmunoResearch) at 100 μL per well for 30 min at RT. The plates were washed four times, and incubated with 100 μL of ABTS for 2 mins at room temperature. The absorbance results were read at 405 nm. As shown in FIG. 189A-189D, the components including IL7, IL21, IL15, and 4.1BBL in 7t15-21s137L (long version) were detected by the individual antibodies.

[1399] The following experiment was conducted to evaluate the activity of IL15 in 7t15-21s137L (long version) and 7t15-21s137L (short version). The ability of 7t15-21s137L (long version) and 7t15-21s137L (short version) to promote proliferation of IL2Rαβγ-expressing CTLL2 cells was compared with that of recombinant IL15. IL15 dependent CTLL2 cells were washed five times with IMDM-10% FBS and seeded to the wells at 2×10⁴ cells/well. Serially diluted 7t15-21s137L (long version), 7t15-21s137L (short version), or IL15 were added to the cells. Cells were incubated in a CO₂ incubator at 37° C. for 3 days. Cell proliferation was detected by adding 20 μL of PrestoBlue (A13261, ThermoFisher) to each well on day 3 and incubated for an additional 4 hours in a CO₂ incubator at 37° C. Raw absorbance at 570-610 nm was read in a micro-titer plate reader. As shown in FIG. 190, 7t15-21s137L (long version), 7t15-21s137L (short version), and IL15 all promoted CTLL2 cell proliferation. The EC₅₀ of 7t15-21s137L (long version), 7t15-21s137L (short version), and IL-15 is 5119 pM, 55.75 pM, and 4.947 pM, respectively.

### Example 73: Induction of Treg Cells by 2t2

[1400] The peripheral blood mononuclear cells (PBMC) of a healthy donor (Donor 163) were isolated from 5 mL of whole blood buffy coats by Ficoll Paque Plus (GE17144003). The PBMC were then lysed with ACK to remove red blood cells. Cells were washed with IMDM-10% FBS and counted. 1.8×10⁶ cells (100 μL/tube) were seeded to the flow tubes and incubated with 50 μL of descending 2t2 or IL2 (15000, 1500, 150, 15, 1.5, 0.15, or 0 pM) and 50 μL of pre-staining antibodies (anti-CD8-BV605 and anti-CD127-AF647). Cells were incubated for 30 min at 37° C. in water bath. 200 μL of pre-warmed BD Phosflow Fix Buffer I (Cat #557870, Becton Dickinson Biosciences) was added for 10 min at 37° C. in water bath to stop the stimulation. Cells (4.5×10⁵ cells/100 μL) were transferred to a V-shape 96-well plate and were spun down followed by permeabilization with 100 μL of −20° C. pre-cooled BD Phosflow Perm Buffer III (Cat # BD Biosciences) for 30 min on ice. The cells were then extensively washed ×2 with 200 μL of FACS buffer and stained with a panel of fluorescent antibodies (anti-CD25-PE, CD4-PerCP-Cy5.5, CD56-BV421, CD45RA-PE-Cy7 and pSTAT5a-AF488) to distinguish between different lymphocyte subpopulations and evaluate the pSTAT5a status. Cells were spun down and resuspended in 200 μL of FACS buffer for FACSCelesta analysis. As shown in FIG. 191A, 6 pM of 2t2 was sufficient to induce the phosphorylation of Stat5a in CD4⁺CD25^{hi} T_{reg} cells while 43.11 pM of IL-2 was required to induce phosphorylation of Stat5a in the same population of lymphocytes. In contrast, 2t2 was less active (FIG. 191B) or equally active (FIG. 191C) as compared to IL2 in inducing phosphorylation of Stat5a in CD4⁺CD25⁻T_{con} and CD8⁺ T_{con} cells. These results suggest that 2t2 is superior as compared to IL2 in activating T_{reg} in human PBMC, and that 2t2 demonstrates increased T_{reg} selectivity compared to IL-2 in human blood lymphocyte pStat5a responses.

### Example 74. Improvement in Hair Growth Using a Single-Chain Chimeric Polypeptide

[1401] The dorsal hair of 7-week-old C57BL6/J mice was shaved and depilated using commercial depilatory cream. The mice were injected on the same day subcutaneously with a single dose of 2t2 or low dose commercially available recombinant IL-2, followed by daily dosing for four additional days. Untreated mice served as controls. On day 10, the mice were sacrificed and skin sections of the shaved areas were prepared. Representative H&E staining of skin sections from C57BL6J mice on day 10 following depilation are shown in FIGS. 192A-192E. FIG. 192A shows control mice—only depilation done after hair was shaved, FIG. 192B shows mice where depilation was followed by low dose IL-2 (1 mg/kg) administration, and FIGS. 192C-192E shows mice where depilation was followed by 2t2 administered at 0.3 mg/kg (FIG. 192C), 1 mg/kg (FIG. 192D), and 3 mg/kg (FIG. 192E). Black arrows indicate anagen-phase hair follicles that will later extend into dermis and facilitate hair growth. FIG. 194 shows the total number of anagen phase hair follicles counted per 10 fields for each treatment group. In summary, the data show that the 2t2 molecule resulted in increased numbers of anagen-phase hair follicles compared to depilation alone. This effect was also dose-dependent.

### Example 75: Differentiation of the Immune Cell into a Memory-Like Immune Cell

[1402] Fresh human leukocytes were obtained from the blood bank and CD56⁺ NK cells were isolated with the RosetteSep/human NK cell reagent (StemCell Technologies). The purity of NK cells was >70% and confirmed by staining with CD56-BV421, CD16-BV510, CD25-PE, CD69-APCFire750 (BioLegend). The cells were counted and resuspended at a density of 2×10⁶ cells/mL in RPMI 1640 medium (Gibco) supplemented with 2 mM L-glutamine (Thermo Life Technologies), antibiotics (penicillin, 10,000 units/mL; streptomycin, 10,000 μg/mL; Thermo Life Technologies), and 10% FBS (Hyclone). The cells (1 mL) were transferred into a 24-well flat bottom plate, and subjected to either: no treatment, or expanded with 7t15-21s+anti-tissue factor (TF)-antibody (IgG1) (50 nM) for 14 days with medium. The cells were replenished with fresh 7t15-21s+anti-TF-antibody (IgG1) (50 nM) to keep the cell density at approximately 1×10⁶ cells/mL.

[1403] Unexpanded NK cells to treatment groups were used as positive controls for full DNA methylation levels (Data not shown). NK cells were pelleted (1×10⁶), and genomic DNA (nDNA) isolated using the QIAamp UCP DNA Micro Kit (Qiagen). 500 ng of purified nDNA was subjected to sodium bisulfite treatment using the EZ DNA Methylation-Direct kit (Zymo Research) according to the manufacturer's protocol. Bisulfite treatment introduces methylation-dependent changes in the DNA with demethylated cytosines being converted into uracil, whereas methylated cytosines remain unchanged. The bisulfite-treated nDNA (10-50 ng) was used as template to PCR amplify a 228 bp region of the IFNγ promoter containing two CpG sites (CpG-186 and CpG-54, position relative to the transcription start site, TSS), known to be heavily regulated by DNA methylation in T cells, using the Pyromark PCR kit (Qiagen) with the forward primer IFNG127F (5′-ATGGTATAGGTGGGTATAATGG-3′) and the biotinylated reverse primer IFNG355R-bio (biotin-5¹-CAATATACTACACCTCCTCTAACTAC-3′) (GENEWIZ). The PCR conditions were 15 minutes at 95° C., 48 cycles of 30 seconds at 95° C., 30 seconds at 56° C., 60 seconds at 72° C. followed by 10 minutes at 72° C. The integrity and quality of the PCR amplified products were visualized on a 1.2% TAE agarose gel. The DNA methylation status of these two CpG sites was determined by pyrosequencing, which is the gold standard technique to quantitatively measure DNA methylation at single CpG-site. Pyrosequencing reactions were performed at Johns Hopkins University Genetic Resources Core Facility using the DNA sequencing primers C186-IFNG135F (5′-GGTGGGTATAATGGG-3′) (SEQ ID NO: 333) and C54-IFNG261F (5′-ATTATTTTATTTTAAAAAATTTGTG-3′) (SEQ ID NO: 334), specific to the CpG sites −186 and −54, respectively. Commercially available non-methylated and methylated DNA (Zymo Research) were used as controls for DNA methylation. The methylation percentages of the two CpG sites (−186 and −54) were pooled for each treatment. The percent difference in DNA methylation was calculated relative to the levels of DNA methylation at the two CpG sites observed in unexposed NK cells.

[1404] Analysis of the DNA methylation status of these two IFNγ CpG sites revealed higher levels of DNA demethylation in NK cells supported by 7t15-21s+anti-TF-antibody compared to unexposed NK cells (FIG. 194). These 7t15-21s+anti-TF-antibody supported NK cells exhibited 47.70%±11.76 difference in DNA methylation (i.e., demethylation) compared to unexposed NK cells. The DNA methylation levels of these two IFNγ CpG sites correlated with increased expression of IFNγ following treatment with 7t15-21s+anti-TF-antibody. These data suggest that long-term exposure of NK cells (14 days expansion in culture) with a combination regimen of 7t15-21s+anti-TF-antibody is able to induce DNA demethylation of the two hypomethylated IFNγCpG sites (−186 and −54) and that 7t15-21s+anti-TF-antibody (IgG1) can epigenetically reprogram gene expression of IFNγ via DNA demethylation of CpG sites leading to interconversion of NK cells into innate immune memory NK cells.

### Other Embodiments

[1405] It is to be understood that while the invention has been described in conjunction with the detailed description thereof, the foregoing description is intended to illustrate and not limit the scope of the invention, which is defined by the scope of the appended claims. Other aspects, advantages, and modifications are within the scope of the following claims.

### EXEMPLARY EMBODIMENTS

### Embodiment A1

[1406] A single-chain chimeric polypeptide comprising:

[1407] (i) a first target-binding domain;

[1408] (ii) a soluble tissue factor domain; and

[1409] (iii) a second target-binding domain.

### Embodiment A2

[1410] The single-chain chimeric polypeptide of embodiment A1, wherein the first target-binding domain and the soluble tissue factor domain directly abut each other.

### Embodiment A3

[1411] The single-chain chimeric polypeptide of embodiment A1, wherein the single-chain chimeric polypeptide further comprises a linker sequence between the first target-binding domain and the soluble tissue factor domain.

### Embodiment A4

[1412] The single-chain chimeric polypeptide of any one of embodiments A1-A3, wherein the soluble tissue factor domain and the second target-binding domain directly abut each other.

### Embodiment A5

[1413] The single-chain chimeric polypeptide of any one of embodiments A1-A3, wherein the single-chain chimeric polypeptide further comprises a linker sequence between the soluble tissue factor domain and the second target-binding domain.

### Embodiment A6

[1414] The single-chain chimeric polypeptide of embodiment A1, wherein the first target-binding domain and the second target-binding domain directly abut each other.

### Embodiment A7

[1415] The single-chain chimeric polypeptide of embodiment A1, wherein the single-chain chimeric polypeptide further comprises a linker sequence between the first target-binding domain and the second target-binding domain.

### Embodiment A8

[1416] The single-chain chimeric polypeptide of embodiment A6 or A7, wherein the second target-binding domain and the soluble tissue factor domain directly abut each other.

### Embodiment A9

[1417] The single-chain chimeric polypeptide of embodiment A6 or A7, wherein the single-chain chimeric polypeptide further comprises a linker sequence between the second target-binding domain and the soluble tissue factor domain.

### Embodiment A10

[1418] The single-chain chimeric polypeptide of any one of embodiments A1-A9, wherein the first target-binding domain and the second target-binding domain bind specifically to the same antigen.

### Embodiment A11

[1419] The single-chain chimeric polypeptide of embodiment A10, wherein the first target-binding domain and the second target-binding domain bind specifically to the same epitope.

### Embodiment A12

[1420] The single-chain chimeric polypeptide of embodiment A11, wherein the first target-binding domain and the second target-binding domain comprise the same amino acid sequence.

### Embodiment A13

[1421] The single-chain chimeric polypeptide of any one of embodiments A1-A9, wherein the first target-binding domain and the second target-binding domain bind specifically to different antigens.

### Embodiment A14

[1422] The single-chain chimeric polypeptide of any one of embodiments A1-A13, wherein one or both of the first target-binding domain and the second target-binding domain is an antigen-binding domain.

### Embodiment A15

[1423] The single-chain chimeric polypeptide of embodiment A14, wherein the first target-binding domain and the second target-binding domain are each an antigen-binding domain.

### Embodiment A16

[1424] The single-chain chimeric polypeptide of embodiment A13, wherein antigen-binding domain comprises a scFv or a single domain antibody.

### Embodiment A17

[1425] The single-chain chimeric polypeptide of any one of embodiments A1-A16, wherein one or both of the first target-binding domain and the second target-binding domain bind to a target selected from the group consisting of: CD16a, CD28, CD3, CD33, CD20, CD19, CD22, CD123, IL-1R, IL-1, VEGF, IL-6R, IL-4, IL-10, PDL-1, TIGIT, PD-1, TIM3, CTLA4, MICA, MICB, IL-6, IL-8, TNFα, CD26, CD36, ULBP2, CD30, CD200, IGF-1R, MUC4AC, MUC5AC, Trop-2, CMET, EGFR, HER1, HER2, HER3, PSMA, CEA, B7H3, EPCAM, BCMA, P-cadherin, CEACAM5, a UL16-binding protein, HLA-DR, DLL4, TYRO3, AXL, MER, CD122, CD155, PDGF-DD, a ligand of TGF-β receptor II (TGF-βRII), a ligand of TGF-βRIII, a ligand of DNAM1, a ligand of NKp46, a ligand of NKp44, a ligand of NKG2D, a ligand of NKp30, a ligand for a scMHCI, a ligand for a scMHCII, a ligand for a scTCR, a receptor for IL-1, a receptor for IL-2, a receptor for IL-3, a receptor for IL-7, a receptor for IL-8, a receptor for IL-10, a receptor for IL-12, a receptor for IL-15, a receptor for IL-17, a receptor for IL-18, a receptor for IL-21, a receptor for PDGF-D, a receptor for stem cell factor (SCF), a receptor for stem cell-like tyrosine kinase 3 ligand (FLT3L), a receptor for MICA, a receptor for MICB, a receptor for a ULP16-binding protein, a receptor for CD155, a receptor for CD122, and a receptor for CD28.

### Embodiment A18

[1426] The single-chain chimeric polypeptide of any one of embodiments A1-A16, wherein one or both of the first target-binding domain and the second target-binding domain is a soluble interleukin or cytokine protein.

### Embodiment A19

[1427] The single-chain chimeric polypeptide of embodiment A18, wherein the soluble interleukin, cytokine, or ligand protein is selected from the group consisting of: IL-1, IL-2, IL-3, IL-7, IL-8, IL-10, IL-12, IL-15, IL-17, IL-18, IL-21, PDGF-D, and SCF, FLT3L, MICA, MICB, and a ULP16-binding protein.

### Embodiment A20

[1428] The single-chain chimeric polypeptide of any one of embodiments A1-A16, wherein one or both of the first target-binding domain and the second target-binding domain is a soluble interleukin or cytokine receptor.

### Embodiment A21

[1429] The single-chain chimeric polypeptide of embodiment A20, wherein the soluble interleukin or cytokine receptor is a soluble TGF-β receptor II (TGF-βRII), a soluble TGF-βRIII, a soluble NKG2D, a soluble NKp30, a soluble NKp44, a soluble NKp46, a soluble DNAM1, a scMHCI, a scMHCII, a scTCR, a soluble CD155, or a soluble CD28.

### Embodiment A22

[1430] The single-chain chimeric polypeptide of any one of embodiments A1-A21, wherein the soluble tissue factor domain is a soluble human tissue factor domain.

### Embodiment A23

[1431] The single-chain chimeric polypeptide of embodiment A22, wherein the soluble human tissue factor domain comprises a sequence that is at least 80% identical to SEQ ID NO: 93.

### Embodiment A24

[1432] The single-chain chimeric polypeptide of embodiment A23, wherein the soluble human tissue factor domain comprises a sequence that is at least 90% identical to SEQ ID NO: 93.

### Embodiment A25

[1433] The single-chain chimeric polypeptide of embodiment A24, wherein the soluble human tissue factor domain comprises a sequence that is at least 95% identical to SEQ ID NO: 93.

### Embodiment A26

[1434] The single-chain chimeric polypeptide of any one of embodiments A22-A25, wherein the soluble human tissue factor domain does not comprise one or more of:

[1435] a lysine at an amino acid position that corresponds to amino acid position 20 of mature wildtype human tissue factor protein;

[1436] an isoleucine at an amino acid position that corresponds to amino acid position 22 of mature wildtype human tissue factor protein;

[1437] a tryptophan at an amino acid position that corresponds to amino acid position 45 of mature wildtype human tissue factor protein;

[1438] an aspartic acid at an amino acid position that corresponds to amino acid position 58 of mature wildtype human tissue factor protein;

[1439] a tyrosine at an amino acid position that corresponds to amino acid position 94 of mature wildtype human tissue factor protein;

[1440] an arginine at an amino acid position that corresponds to amino acid position 135 of mature wildtype human tissue factor protein; and

[1441] a phenylalanine at an amino acid position that corresponds to amino acid position 140 of mature wildtype human tissue factor protein.

### Embodiment A27

[1442] The single-chain chimeric polypeptide of embodiment A26, wherein the soluble human tissue factor domain does not comprise any of:

[1443] a lysine at an amino acid position that corresponds to amino acid position 20 of mature wildtype human tissue factor protein;

[1444] an isoleucine at an amino acid position that corresponds to amino acid position 22 of mature wildtype human tissue factor protein;

[1445] a tryptophan at an amino acid position that corresponds to amino acid position 45 of mature wildtype human tissue factor protein;

[1446] an aspartic acid at an amino acid position that corresponds to amino acid position 58 of mature wildtype human tissue factor protein;

[1447] a tyrosine at an amino acid position that corresponds to amino acid position 94 of mature wildtype human tissue factor protein;

[1448] an arginine at an amino acid position that corresponds to amino acid position 135 of mature wildtype human tissue factor protein; and

[1449] a phenylalanine at an amino acid position that corresponds to amino acid position 140 of mature wildtype human tissue factor protein.

### Embodiment A28

[1450] The single-chain chimeric polypeptide of any one of embodiments A1-A27, wherein the soluble tissue factor domain is not capable of binding Factor VIIa.

### Embodiment A29

[1451] The single-chain chimeric polypeptide of any one of embodiments A1-A28, wherein the soluble tissue factor domain does not convert inactive Factor X into Factor Xa.

### Embodiment A30

[1452] The single-chain chimeric polypeptide of any one of embodiments A1-A29, wherein the single-chain chimeric polypeptide does not stimulate blood coagulation in a mammal.

### Embodiment A31

[1453] The single-chain chimeric polypeptide of any one of embodiments A1-A30, wherein the single-chain chimeric polypeptide further comprises one or more additional target-binding domains at its N- and/or C-terminus.

### Embodiment A32

[1454] The single-chain chimeric polypeptide of embodiment A31, wherein the single-chain chimeric polypeptide comprises one or more additional target-binding domains at its N-terminus.

### Embodiment A33

[1455] The single-chain chimeric polypeptide of embodiment A32, wherein one or more additional target-binding domains directly abuts the first target-binding domain, the second target-binding domain, or the soluble tissue factor domain.

### Embodiment A34

[1456] The single-chain chimeric polypeptide of embodiment A33, wherein the single-chain chimeric polypeptide further comprises a linker sequence between one of the at least one additional target-binding domains and the first target-binding domain, the second target-binding domain, or the soluble tissue factor domain.

### Embodiment A35

[1457] The single-chain chimeric polypeptide of embodiment A31, wherein the single-chain chimeric polypeptide comprises one or more additional target-binding domains at its C-terminus.

### Embodiment A36

[1458] The single-chain chimeric polypeptide of embodiment A35, wherein one of the one or more additional target-binding domains directly abuts the first target-binding domain, the second target-binding domain, or the soluble tissue factor domain.

### Embodiment A37

[1459] The single-chain chimeric polypeptide of embodiment A35, wherein the single-chain chimeric polypeptide further comprises a linker sequence between one of the at least one additional target-binding domains and the first target-binding domain, the second target-binding domain, or the soluble tissue factor domain.

### Embodiment A38

[1460] The single-chain chimeric polypeptide of embodiment A31, wherein the single-chain chimeric polypeptide comprises one or more additional target binding domains at its N-terminus and the C-terminus.

### Embodiment A39

[1461] The single-chain chimeric polypeptide of embodiment A38, wherein one of the one or more additional antigen binding domains at the N-terminus directly abuts the first target-binding domain, the second target-binding domain, or the soluble tissue factor domain.

### Embodiment A40

[1462] The single-chain chimeric polypeptide of embodiment A38, wherein the single-chain chimeric polypeptide further comprises a linker sequence between one of the one or more additional antigen-binding domains at the N-terminus and the first target-binding domain, the second target-binding domain, or the soluble tissue factor domain.

### Embodiment A41

[1463] The single-chain chimeric polypeptide of embodiment A38, wherein one of the one or more additional antigen binding domains at the C-terminus directly abuts the first target-binding domain, the second target-binding domain, or the soluble tissue factor domain.

### Embodiment A42

[1464] The single-chain chimeric polypeptide of embodiment A38, wherein the single-chain chimeric polypeptide further comprises a linker sequence between one of the one or more additional antigen-binding domains at the C-terminus and the first target-binding domain, the second target-binding domain, or the soluble tissue factor domain.

### Embodiment A43

[1465] The single-chain chimeric polypeptide of any one of embodiments A31-A42, wherein two or more of the first target-binding domain, the second target-binding domain, and the one or more additional target-binding domains bind specifically to the same antigen.

### Embodiment A44

[1466] The single-chain chimeric polypeptide of embodiment A43, wherein two or more of the first target-binding domain, the second target-binding domain, and the one or more additional target-binding domains bind specifically to the same epitope.

### Embodiment A45

[1467] The single-chain chimeric polypeptide of embodiment A44, wherein two or more of the first target-binding domain, the second target-binding domain, and the one or more additional target-binding domains comprise the same amino acid sequence.

### Embodiment A46

[1468] The single-chain chimeric polypeptide of embodiment A43, wherein the first target-binding domain, the second target-binding domain, and the one or more additional target-binding domains each bind specifically to the same antigen.

### Embodiment A47

[1469] The single-chain chimeric polypeptide of embodiment A46, wherein the first target-binding domain, the second target-binding domain, and the one or more additional target-binding domains each bind specifically to the same epitope.

### Embodiment A48

[1470] The single-chain chimeric polypeptide of embodiment A47, wherein the first target-binding domain, the second target-binding domain, and the one or more additional target-binding domains each comprise the same amino acid sequence.

### Embodiment A49

[1471] The single-chain chimeric polypeptide of any one of embodiments A31-A42, wherein the first target-binding domain, the second target-binding domain, and the one or more additional target-binding domains bind specifically to different antigens.

### Embodiment A50

[1472] The single-chain chimeric polypeptide of any one of embodiments A31-A49, wherein one or more of the first target-binding domain, the second target-binding domain, and the one or more target-binding domains is an antigen-binding domain.

### Embodiment A51

[1473] The single-chain chimeric polypeptide of embodiment A50, wherein the first target-binding domain, the second target-binding domain, and the one or more additional target-binding domains are each an antigen-binding domain.

### Embodiment A52

[1474] The single-chain chimeric polypeptide of embodiment A51, wherein antigen-binding domain comprises a scFv or a single domain antibody.

### Embodiment A53

[1475] The single-chain chimeric polypeptide of any one of embodiments A31-A52, wherein one or more of the first target-binding domain, the second target-binding domain, and the one or more target-binding domains bind specifically to a target selected from the group consisting of: CD16a, CD28, CD3, CD33, CD20, CD19, CD22, CD123, IL-1R, IL-1, VEGF, IL-6R, IL-4, IL-10, PDL-1, TIGIT, PD-1, TIM3, CTLA4, MICA, MICB, IL-6, IL-8, TNFα, CD26, CD36, ULBP2, CD30, CD200, IGF-1R, MUC4AC, MUC5AC, Trop-2, CMET, EGFR, HER1, HER2, HER3, PSMA, CEA, B7H3, EPCAM, BCMA, P-cadherin, CEACAM5, a UL16-binding protein, HLA-DR, DLL4, TYRO3, AXL, MER, CD122, CD155, PDGF-DD, a ligand of TGF-β receptor II (TGF-βRII), a ligand of TGF-βRIII, a ligand of DNAM1, a ligand of NKp46, a ligand of NKp44, a ligand of NKG2D, a ligand of NKp30, a ligand for a scMHCI, a ligand for a scMHCII, a ligand for a scTCR, a receptor for IL-1, a receptor for IL-2, a receptor for IL-3, a receptor for IL-7, a receptor for IL-8, a receptor for IL-10, a receptor for IL-12, a receptor for IL-15, a receptor for IL-17, a receptor for IL-18, a receptor for IL-21, a receptor for PDGF-D, a receptor for stem cell factor (SCF), a receptor for stem cell-like tyrosine kinase 3 ligand (FLT3L), a receptor for MICA, a receptor for MICB, a receptor for a ULP16-binding protein, a receptor for CD155, a receptor for CD122, and a receptor for CD28.

### Embodiment A54

[1476] The single-chain chimeric polypeptide of any one of embodiments A31-A52, wherein one or more of the first target-binding domain, the second target-binding domain, and the one or more additional target-binding domains is a soluble interleukin or cytokine protein.

### Embodiment A55

[1477] The single-chain chimeric polypeptide of embodiment A54, wherein the soluble interleukin, cytokine, or ligand protein is selected from the group consisting of: IL-1, IL-2, IL-3, IL-7, IL-8, IL-10, IL-12, IL-15, IL-17, IL-18, IL-21, PDGF-D, and SCF, FLT3L, MICA, MICB, and a ULP16-binding protein.

### Embodiment A56

[1478] The single-chain chimeric polypeptide of any one of embodiments A31-A52, wherein one or more of the first target-binding domain, the second target-binding domain, and the one or more additional target-binding domains is a soluble interleukin or cytokine receptor.

### Embodiment A57

[1479] The single-chain chimeric polypeptide of embodiment A56, wherein the soluble receptor is a soluble TGF-β receptor II (TGF-βRII), a soluble TGF-βRIII, a soluble NKG2D, a soluble NKp30, a soluble NKp44, a soluble NKp46, a soluble DNAM1, a scMHCI, a scMHCII, a scTCR, a soluble CD155, a soluble CD122, a soluble CD3, or a soluble CD28.

### Embodiment A58

[1480] The single-chain chimeric polypeptide of any one of embodiments A1-A57, wherein the single-chain chimeric polypeptide further comprises a signal sequence at its N-terminal end.

### Embodiment A59

[1481] The single-chain chimeric polypeptide of any one of embodiments A1-A58, wherein the single-chain chimeric polypeptide further comprises a peptide tag positioned at the N-terminal end or the C-terminal end of the single-chain chimeric polypeptide.

### Embodiment A60

[1482] A composition comprising any of the single-chain chimeric polypeptides of embodiments A1-A59.

### Embodiment A61

[1483] The composition of embodiment A60, wherein the composition is a pharmaceutical composition.

### Embodiment A62

[1484] A kit comprising at least one dose of the composition of embodiment A60 or A61.

### Embodiment A63

[1485] Nucleic acid encoding any of the single-chain chimeric polypeptides of any one of embodiments A1-A59.

### Embodiment A64

[1486] A vector comprising the nucleic acid of embodiment A63.

### Embodiment A65

[1487] The vector of embodiment A64, wherein the vector is an expression vector.

### Embodiment A66

[1488] A cell comprising the nucleic acid of embodiment A63 or the vector of embodiment A64 or A65.

### Embodiment A67

[1489] A method of producing a single-chain chimeric polypeptide, the method comprising:

[1490] culturing the cell of embodiment A66 in a culture medium under conditions sufficient to result in the production of the single-chain chimeric polypeptide; and

[1491] recovering the single-chain chimeric polypeptide from the cell and/or the culture medium.

### Embodiment A68

[1492] A single-chain chimeric polypeptide produced by the method of embodiment A67.

### Embodiment A69

[1493] The single-chain chimeric polypeptide of embodiment A26, wherein the soluble human tissue factor domain comprises a sequence that is at least 80% identical to SEQ ID NO: 97.

### Embodiment A70

[1494] The single-chain chimeric polypeptide of embodiment A69, wherein the soluble human tissue factor domain comprises a sequence that is at least 90% identical to SEQ ID NO: 97.

### Embodiment A71

[1495] The single-chain chimeric polypeptide of embodiment A70, wherein the soluble human tissue factor domain comprises a sequence that is at least 95% identical to SEQ ID NO: 97.

### Embodiment A72

[1496] The single-chain chimeric polypeptide of embodiment A71, wherein the soluble human tissue factor domain comprises a sequence that is 100% identical to SEQ ID NO: 97.

### Embodiment A73

[1497] The single-chain chimeric polypeptide of embodiment A26, wherein the soluble human tissue factor domain comprises a sequence that is at least 80% identical to SEQ ID NO: 98.

### Embodiment A74

[1498] The single-chain chimeric polypeptide of embodiment A73, wherein the soluble human tissue factor domain comprises a sequence that is at least 90% identical to SEQ ID NO: 98.

### Embodiment A75

[1499] The single-chain chimeric polypeptide of embodiment A74, wherein the soluble human tissue factor domain comprises a sequence that is at least 95% identical to SEQ ID NO: 98.

### Embodiment A76

[1500] The single-chain chimeric polypeptide of embodiment A75, wherein the soluble human tissue factor domain comprises a sequence that is 100% identical to SEQ ID NO: 98.

### Embodiment B1

[1501] A single-chain chimeric polypeptide comprising:

[1502] (i) a first target-binding domain;

[1503] (ii) a soluble tissue factor domain; and

[1504] (iii) a second target-binding domain,

[1505] wherein:

[1506] the first target-binding domain and the second target-binding domain each specifically bind to an IL-2 receptor; or

[1507] the first target-binding domain and the second target-binding domain each specifically bind to an IL-15 receptor.

### Embodiment B2

[1508] The single-chain chimeric polypeptide of embodiment B1, wherein the first target-binding domain and the soluble tissue factor domain directly abut each other.

### Embodiment B3

[1509] The single-chain chimeric polypeptide of embodiment B1, wherein the single-chain chimeric polypeptide further comprises a linker sequence between the first target-binding domain and the soluble tissue factor domain.

### Embodiment B4

[1510] The single-chain chimeric polypeptide of any one of embodiments B1-B3, wherein the soluble tissue factor domain and the second target-binding domain directly abut each other.

### Embodiment B5

[1511] The single-chain chimeric polypeptide of any one of embodiments B1-B3, wherein the single-chain chimeric polypeptide further comprises a linker sequence between the soluble tissue factor domain and the second target-binding domain.

### Embodiment B6

[1512] The single-chain chimeric polypeptide of embodiment B1, wherein the first target-binding domain and the second target-binding domain directly abut each other.

### Embodiment B7

[1513] The single-chain chimeric polypeptide of embodiment B1, wherein the single-chain chimeric polypeptide further comprises a linker sequence between the first target-binding domain and the second target-binding domain.

### Embodiment B8

[1514] The single-chain chimeric polypeptide of embodiment B6 or B7, wherein the second target-binding domain and the soluble tissue factor domain directly abut each other.

### Embodiment B9

[1515] The single-chain chimeric polypeptide of embodiment B6 or B7, wherein the single-chain chimeric polypeptide further comprises a linker sequence between the second target-binding domain and the soluble tissue factor domain.

### Embodiment B10

[1516] The single-chain chimeric polypeptide of any one of embodiments B1-B9, wherein both the first target-binding domain and the second target-binding domain is a soluble interleukin protein.

### Embodiment B11

[1517] The single-chain chimeric polypeptide of embodiment B10, wherein the first target-binding domain and the second target-binding domain is a soluble IL-2 protein.

### Embodiment B12

[1518] The single-chain chimeric polypeptide of embodiment B11, wherein the soluble IL-2 protein is a soluble human IL-2 protein.

### Embodiment B13

[1519] The single-chain chimeric polypeptide of embodiment B12, wherein the soluble human IL-2 protein comprises SEQ ID NO: 78.

### Embodiment B14

[1520] The single-chain chimeric polypeptide of embodiment B10, wherein the first target-binding domain and the second target-binding domain is a soluble IL-15 protein.

### Embodiment B15

[1521] The single-chain chimeric polypeptide of embodiment B14, wherein the soluble IL-15 protein is a soluble human IL-15 protein.

### Embodiment B16

[1522] The single-chain chimeric polypeptide of embodiment B15, wherein the soluble human IL-15 protein comprises SEQ ID NO: 82.

### Embodiment B17

[1523] The single-chain chimeric polypeptide of any one of embodiments B1-B16, wherein the soluble tissue factor domain is a soluble human tissue factor domain.

### Embodiment B18

[1524] The single-chain chimeric polypeptide of embodiment B17, wherein the soluble human tissue factor domain comprises a sequence that is at least 80% identical to SEQ ID NO: 93.

### Embodiment B19

[1525] The single-chain chimeric polypeptide of embodiment B18, wherein the soluble human tissue factor domain comprises a sequence that is at least 90% identical to SEQ ID NO: 93.

### Embodiment B20

[1526] The single-chain chimeric polypeptide of embodiment B19, wherein the soluble human tissue factor domain comprises a sequence that is at least 95% identical to SEQ ID NO: 93.

### Embodiment B21

[1527] The single-chain chimeric polypeptide of any one of embodiments B17-B20, wherein the soluble human tissue factor domain does not comprise one or more of:

[1528] a lysine at an amino acid position that corresponds to amino acid position 20 of mature wildtype human tissue factor protein;

[1529] an isoleucine at an amino acid position that corresponds to amino acid position 22 of mature wildtype human tissue factor protein;

[1530] a tryptophan at an amino acid position that corresponds to amino acid position 45 of mature wildtype human tissue factor protein;

[1531] an aspartic acid at an amino acid position that corresponds to amino acid position 58 of mature wildtype human tissue factor protein;

[1532] a tyrosine at an amino acid position that corresponds to amino acid position 94 of mature wildtype human tissue factor protein;

[1533] an arginine at an amino acid position that corresponds to amino acid position 135 of mature wildtype human tissue factor protein; and

[1534] a phenylalanine at an amino acid position that corresponds to amino acid position 140 of mature wildtype human tissue factor protein.

### Embodiment B22

[1535] The single-chain chimeric polypeptide of embodiment B21, wherein the soluble human tissue factor domain does not comprise any of:

[1536] a lysine at an amino acid position that corresponds to amino acid position 20 of mature wildtype human tissue factor protein;

[1537] an isoleucine at an amino acid position that corresponds to amino acid position 22 of mature wildtype human tissue factor protein;

[1538] a tryptophan at an amino acid position that corresponds to amino acid position 45 of mature wildtype human tissue factor protein;

[1539] an aspartic acid at an amino acid position that corresponds to amino acid position 58 of mature wildtype human tissue factor protein;

[1540] a tyrosine at an amino acid position that corresponds to amino acid position 94 of mature wildtype human tissue factor protein;

[1541] an arginine at an amino acid position that corresponds to amino acid position 135 of mature wildtype human tissue factor protein; and

[1542] a phenylalanine at an amino acid position that corresponds to amino acid position 140 of mature wildtype human tissue factor protein.

### Embodiment B23

[1543] The single-chain chimeric polypeptide of any one of embodiments B1-B22, wherein the soluble tissue factor domain is not capable of binding Factor VIIa.

### Embodiment B24

[1544] The single-chain chimeric polypeptide of any one of embodiments B1-B23, wherein the soluble tissue factor domain does not convert inactive Factor X into Factor Xa.

### Embodiment B25

[1545] The single-chain chimeric polypeptide of any one of embodiments B1-B24, wherein the single-chain chimeric polypeptide does not stimulate blood coagulation in a mammal.

### Embodiment B26

[1546] The single-chain chimeric polypeptide of any one of embodiments B1-B25, wherein the single-chain chimeric polypeptide further comprises one or more additional target-binding domains at its N- and/or C-terminus.

### Embodiment B27

[1547] The single-chain chimeric polypeptide of embodiment B26, wherein the single-chain chimeric polypeptide comprises one or more additional target-binding domains at its N-terminus.

### Embodiment B28

[1548] The single-chain chimeric polypeptide of embodiment B27, wherein one or more additional target-binding domains directly abuts the first target-binding domain, the second target-binding domain, or the soluble tissue factor domain.

### Embodiment B29

[1549] The single-chain chimeric polypeptide of embodiment B28, wherein the single-chain chimeric polypeptide further comprises a linker sequence between one of the at least one additional target-binding domains and the first target-binding domain, the second target-binding domain, or the soluble tissue factor domain.

### Embodiment B30

[1550] The single-chain chimeric polypeptide of embodiment B26, wherein the single-chain chimeric polypeptide comprises one or more additional target-binding domains at its C-terminus.

### Embodiment B31

[1551] The single-chain chimeric polypeptide of embodiment B30, wherein one of the one or more additional target-binding domains directly abuts the first target-binding domain, the second target-binding domain, or the soluble tissue factor domain.

### Embodiment B32

[1552] The single-chain chimeric polypeptide of embodiment B30, wherein the single-chain chimeric polypeptide further comprises a linker sequence between one of the at least one additional target-binding domains and the first target-binding domain, the second target-binding domain, or the soluble tissue factor domain.

### Embodiment B33

[1553] The single-chain chimeric polypeptide of embodiment B26, wherein the single-chain chimeric polypeptide comprises one or more additional target binding domains at its N-terminus and the C-terminus.

### Embodiment B34

[1554] The single-chain chimeric polypeptide of embodiment B33, wherein one of the one or more additional antigen binding domains at the N-terminus directly abuts the first target-binding domain, the second target-binding domain, or the soluble tissue factor domain.

### Embodiment B35

[1555] The single-chain chimeric polypeptide of embodiment B33, wherein the single-chain chimeric polypeptide further comprises a linker sequence between one of the one or more additional antigen-binding domains at the N-terminus and the first target-binding domain, the second target-binding domain, or the soluble tissue factor domain.

### Embodiment B36

[1556] The single-chain chimeric polypeptide of embodiment B33, wherein one of the one or more additional antigen binding domains at the C-terminus directly abuts the first target-binding domain, the second target-binding domain, or the soluble tissue factor domain.

### Embodiment B37

[1557] The single-chain chimeric polypeptide of embodiment B33, wherein the single-chain chimeric polypeptide further comprises a linker sequence between one of the one or more additional antigen-binding domains at the C-terminus and the first target-binding domain, the second target-binding domain, or the soluble tissue factor domain.

### Embodiment B38

[1558] The single-chain chimeric polypeptide of any one of embodiments B26-B37, wherein each of the first target-binding domain, the second target-binding domain, and the one or more additional target-binding domains bind specifically to an IL-2 receptor or an IL-15 receptor.

### Embodiment B39

[1559] The single-chain chimeric polypeptide of embodiment B38, wherein each of the first target-binding domain, the second target-binding domain, and the one or more additional target-binding domains comprise the same amino acid sequence.

### Embodiment B40

[1560] The single-chain chimeric polypeptide of any one of embodiments B26-B37, wherein the one or more additional target-binding domains is an antigen-binding domain.

### Embodiment B41

[1561] The single-chain chimeric polypeptide of embodiment B40, wherein the antigen-binding domain comprises a scFv or a single domain antibody.

### Embodiment B42

[1562] The single-chain chimeric polypeptide of any one of embodiments B26-B37, B40, and B41, wherein the one or more additional target-binding domains bind specifically to a target selected from the group consisting of: CD16a, CD28, CD3, CD33, CD20, CD19, CD22, CD123, IL-1R, IL-1, VEGF, IL-6R, IL-4, IL-10, PDL-1, TIGIT, PD-1, TIM3, CTLA4, MICA, MICB, IL-6, IL-8, TNFα, CD26, CD36, ULBP2, CD30, CD200, IGF-1R, MUC4AC, MUC5AC, Trop-2, CMET, EGFR, HER1, HER2, HER3, PSMA, CEA, B7H3, EPCAM, BCMA, P-cadherin, CEACAM5, a UL16-binding protein, HLA-DR, DLL4, TYRO3, AXL, MER, CD122, CD155, PDGF-DD, a ligand of TGF-β receptor II (TGF-βRII), a ligand of TGF-βRIII, a ligand of DNAM1, a ligand of NKp46, a ligand of NKp44, a ligand of NKG2D, a ligand of NKp30, a ligand for a scMHCI, a ligand for a scMHCII, a ligand for a scTCR, a receptor for IL-1, a receptor for IL-2, a receptor for IL-3, a receptor for IL-7, a receptor for IL-8, a receptor for IL-10, a receptor for IL-12, a receptor for IL-15, a receptor for IL-17, a receptor for IL-18, a receptor for IL-21, a receptor for PDGF-DD, a receptor for stem cell factor (SCF), a receptor for stem cell-like tyrosine kinase 3 ligand (FLT3L), a receptor for MICA, a receptor for MICB, a receptor for a ULP16-binding protein, a receptor for CD155, a receptor for CD122, and a receptor for CD28.

### Embodiment B43

[1563] The single-chain chimeric polypeptide of any one of embodiments B6-B37, B40, and B41, wherein the one or more additional target-binding domains is a soluble interleukin or cytokine protein.

### Embodiment B44

[1564] The single-chain chimeric polypeptide of embodiment B43, wherein the soluble interleukin or cytokine protein is selected from the group consisting of: IL-1, IL-2, IL-3, IL-7, IL-8, IL-10, IL-12, IL-15, IL-17, IL-18, IL-21, PDGF-DD, and SCF.

### Embodiment B45

[1565] The single-chain chimeric polypeptide of any one of embodiments B6-B37, B40, and B41, wherein the one or more additional target-binding domains is a soluble interleukin or cytokine receptor.

### Embodiment B46

[1566] The single-chain chimeric polypeptide of embodiment B45, wherein the soluble receptor is a soluble TGF-β receptor II (TGF-βRII) and a soluble TGF-βRIII.

### Embodiment B47

[1567] The single-chain chimeric polypeptide of any one of embodiments B1-B46, wherein the single-chain chimeric polypeptide further comprises a signal sequence at its N-terminal end.

### Embodiment B48

[1568] The single-chain chimeric polypeptide of any one of embodiments B1-B47, wherein the single-chain chimeric polypeptide further comprises a peptide tag positioned at the N-terminal end or the C-terminal end of the single-chain chimeric polypeptide.

### Embodiment B49

[1569] A composition comprising any of the single-chain chimeric polypeptides of embodiments B1-B48.

### Embodiment B50

[1570] The composition of embodiment B49, wherein the composition is a pharmaceutical composition.

### Embodiment B51

[1571] A kit comprising at least one dose of the composition of embodiment B49 or B50.

### Embodiment B52

[1572] A nucleic acid encoding any of the single-chain chimeric polypeptides of any one of embodiments B1-B48.

### Embodiment B53

[1573] A vector comprising the nucleic acid of embodiment B52.

### Embodiment B54

[1574] The vector of embodiment B53, wherein the vector is an expression vector.

### Embodiment B55

[1575] A cell comprising the nucleic acid of embodiment B52 or the vector of embodiment B53 or B54.

### Embodiment B56

[1576] A method of producing a single-chain chimeric polypeptide, the method comprising:

[1577] culturing the cell of embodiment B55 in a culture medium under conditions sufficient to result in the production of the single-chain chimeric polypeptide; and

[1578] recovering the single-chain chimeric polypeptide from the cell and/or the culture medium.

### Embodiment B57

[1579] A single-chain chimeric polypeptide produced by the method of embodiment B56.

### Embodiment B58

[1580] The single-chain chimeric polypeptide of embodiment B21, wherein the soluble human tissue factor domain comprises a sequence that is at least 80% identical to SEQ ID NO: 97.

### Embodiment B59

[1581] The single-chain chimeric polypeptide of embodiment B58, wherein the soluble human tissue factor domain comprises a sequence that is at least 90% identical to SEQ ID NO: 97.

### Embodiment B60

[1582] The single-chain chimeric polypeptide of embodiment B59, wherein the soluble human tissue factor domain comprises a sequence that is at least 95% identical to SEQ ID NO: 97.

### Embodiment B61

[1583] The single-chain chimeric polypeptide of embodiment B60, wherein the soluble human tissue factor domain comprises a sequence that is 100% identical to SEQ ID NO: 97.

### Embodiment B62

[1584] The single-chain chimeric polypeptide of embodiment B21, wherein the soluble human tissue factor domain comprises a sequence that is at least 80% identical to SEQ ID NO: 98.

### Embodiment B63

[1585] The single-chain chimeric polypeptide of embodiment B62, wherein the soluble human tissue factor domain comprises a sequence that is at least 90% identical to SEQ ID NO: 98.

### Embodiment B64

[1586] The single-chain chimeric polypeptide of embodiment B63, wherein the soluble human tissue factor domain comprises a sequence that is at least 95% identical to SEQ ID NO: 98.

### Embodiment B65

[1587] The single-chain chimeric polypeptide of embodiment B64, wherein the soluble human tissue factor domain comprises a sequence that is 100% identical to SEQ ID NO: 98.

### Embodiment C1

[1588] A multi-chain chimeric polypeptide comprising:

[1589] (a) a first chimeric polypeptide comprising:
[1590] (i) a first target-binding domain;
[1591] (ii) a soluble tissue factor domain; and
[1592] (iii) a first domain of a pair of affinity domains;

[1593] (b) a second chimeric polypeptide comprising:
[1594] (i) a second domain of a pair of affinity domains; and
[1595] (ii) a second target-binding domain,

[1596] wherein the first chimeric polypeptide and the second chimeric polypeptide associate through the binding of the first domain and the second domain of the pair of affinity domains.

### Embodiment C2

[1597] The multi-chain chimeric polypeptide of embodiment C1, wherein the first target-binding domain and the soluble tissue factor domain directly abut each other in the first chimeric polypeptide.

### Embodiment C3

[1598] The multi-chain chimeric polypeptide of embodiment C1, wherein the first chimeric polypeptide further comprises a linker sequence between the first target-binding domain and the soluble tissue factor domain in the first chimeric polypeptide.

### Embodiment C4

[1599] The multi-chain chimeric polypeptide of any one of embodiments C1-C3, wherein the soluble tissue factor domain and the first domain of the pair of affinity domains directly abut each other in the first chimeric polypeptide.

### Embodiment C5

[1600] The multi-chain chimeric polypeptide of any one of embodiments C1-C3, wherein the first chimeric polypeptide further comprises a linker sequence between the soluble tissue factor domain and the first domain of the pair of affinity domains in the first chimeric polypeptide.

### Embodiment C6

[1601] The multi-chain chimeric polypeptide of any one of embodiments C1-05, wherein the second domain of the pair of affinity domains and the second target-binding domain directly abut each other in the second chimeric polypeptide.

### Embodiment C7

[1602] The multi-chain chimeric polypeptide of any one of embodiments C1-05, wherein second chimeric polypeptide further comprises a linker sequence between the second domain of the pair of affinity domains and the second target-binding domain in the second chimeric polypeptide.

### Embodiment C8

[1603] The multi-chain chimeric polypeptide of any one of embodiments C1-C7, wherein the first target-binding domain and the second target-binding domain bind specifically to the same antigen.

### Embodiment C9

[1604] The multi-chain chimeric polypeptide of embodiment C8, wherein the first target-binding domain and the second target-binding domain bind specifically to the same epitope.

### Embodiment C10

[1605] The multi-chain chimeric polypeptide of embodiment C9, wherein the first target-binding domain and the second target-binding domain comprise the same amino acid sequence.

### Embodiment C11

[1606] The multi-chain chimeric polypeptide of any one of embodiments C1-C7, wherein the first target-binding domain and the second target-binding domain bind specifically to different antigens.

### Embodiment C12

[1607] The multi-chain chimeric polypeptide of any one of embodiments C1-C11, wherein one or both of the first target-binding domain and the second target-binding domain is an antigen-binding domain.

### Embodiment C13

[1608] The multi-chain chimeric polypeptide of embodiment C12, wherein the first target-binding domain and the second target-binding domain are each antigen-binding domains.

### Embodiment C14

[1609] The multi-chain chimeric polypeptide of embodiment C12 or C13, wherein antigen-binding domain comprises a scFv or a single domain antibody.

### Embodiment C15

[1610] The multi-chain chimeric polypeptide of any one of embodiments C1-C14, wherein one or both of the first target-binding domain and the second target-binding domain bind specifically to a target selected from the group consisting of: CD16a, CD28, CD3, CD33, CD20, CD19, CD22, CD123, IL-1R, IL-1, VEGF, IL-6R, IL-4, IL-10, PDL-1, TIGIT, PD-1, TIM3, CTLA4, MICA, MICB, IL-6, IL-8, TNFα, CD26, CD36, ULBP2, CD30, CD200, IGF-1R, MUC4AC, MUC5AC, Trop-2, CMET, EGFR, HER1, HER2, HER3, PSMA, CEA, B7H3, EPCAM, BCMA, P-cadherin, CEACAM5, a UL16-binding protein, HLA-DR, DLL4, TYRO3, AXL, MER, CD122, CD155, PDGF-DD, a ligand of TGF-β receptor II (TGF-βRII), a ligand of TGF-βRIII, a ligand of DNAM1, a ligand of NKp46, a ligand of NKp44, a ligand of NKG2D, a ligand of NKp30, a ligand for a scMHCI, a ligand for a scMHCII, a ligand for a scTCR, a receptor for IL-1, a receptor for IL-2, a receptor for IL-3, a receptor for IL-7, a receptor for IL-8, a receptor for IL-10, a receptor for IL-12, a receptor for IL-15, a receptor for IL-17, a receptor for IL-18, a receptor for IL-21, a receptor for PDGF-DD, a receptor for stem cell factor (SCF), a receptor for stem cell-like tyrosine kinase 3 ligand (FLT3L), a receptor for MICA, a receptor for MICB, a receptor for a ULP16-binding protein, a receptor for CD155, a receptor for CD122, and a receptor for CD28.

### Embodiment C16

[1611] The multi-chain chimeric polypeptide of any one of embodiments C1-C14, wherein one or both of the first target-binding domain and the second target-binding domain is a soluble interleukin or cytokine protein.

### Embodiment C17

[1612] The multi-chain chimeric polypeptide of embodiment C16, wherein the soluble interleukin or cytokine protein is selected from the group consisting of: IL-1, IL-2, IL-3, IL-7, IL-8, IL-10, IL-12, IL-15, IL-17, IL-18, IL-21, PDGF-DD, SCF, FLT3L, MICA, MICB, and a ULP16-binding protein.

### Embodiment C18

[1613] The multi-chain chimeric polypeptide of any one of embodiments C1-C14, wherein one or both of the first target-binding domain and the second target-binding domain is a soluble interleukin or cytokine receptor.

### Embodiment C19

[1614] The multi-chain chimeric polypeptide of embodiment C18, wherein the soluble receptor is a soluble TGF-β receptor II (TGF-β MI), a soluble TGF-βRIII, a soluble NKG2D, a soluble NKp30, a soluble NKp44, a soluble NKp46, a soluble DNAM1, a scMHCI, a scMHCII, a scTCR, a soluble CD155, or a soluble CD28.

### Embodiment C20

[1615] The multi-chain chimeric polypeptide of any one of embodiments C1-C19, wherein the first chimeric polypeptide further comprises one or more additional target-binding domain(s), where at least one of the one or more additional antigen-binding domain(s) is positioned between the soluble tissue factor domain and the first domain of the pair of affinity domains.

### Embodiment C21

[1616] The multi-chain chimeric polypeptide of embodiment C20, wherein the first chimeric polypeptide further comprises a linker sequence between the soluble tissue factor domain and the at least one of the one or more additional antigen-binding domain(s), and/or a linker sequence between the at least one of the one or more additional antigen-binding domain(s) and the first domain of the pair of affinity domains.

### Embodiment C22

[1617] The multi-chain chimeric polypeptide of any one of embodiments C1-C19, wherein the first chimeric polypeptide further comprises one or more additional target-binding domains at the N-terminal and/or C-terminal end of the first chimeric polypeptide.

### Embodiment C23

[1618] The multi-chain chimeric polypeptide of embodiment C22, wherein at least one of the one or more additional target-binding domains directly abuts the first domain of the pair of affinity domains in the first chimeric polypeptide.

### Embodiment C24

[1619] The multi-chain chimeric polypeptide of embodiment C22, wherein the first chimeric polypeptide further comprises a linker sequence between the at least one of the one or more additional target-binding domains and the first domain of the pair of affinity domains.

### Embodiment C25

[1620] The multi-chain chimeric polypeptide of embodiment C22, wherein the at least one of the one or more additional target-binding domains directly abuts the first target-binding domain in the first chimeric polypeptide.

### Embodiment C26

[1621] The multi-chain chimeric polypeptide of embodiment C22, wherein the first chimeric polypeptide further comprises a linker sequence between the at least one of the one or more additional target-binding domains and the first target-binding domain.

### Embodiment C27

[1622] The multi-chain chimeric polypeptide of embodiment C22, wherein at least one of the one or more additional target-binding domains is disposed at the N- and/or C-terminus of the first chimeric polypeptide, and at least one of the one or more additional target-binding domains is positioned between the soluble tissue factor domain and the first domain of the pair of affinity domains in the first chimeric polypeptide.

### Embodiment C28

[1623] The multi-chain chimeric polypeptide of embodiment C27, wherein the at least one additional target-binding domain of the one or more additional target-binding domains disposed at the N-terminus directly abuts the first target-binding domain or the first domain of the pair of affinity domains in the first chimeric polypeptide.

### Embodiment C29

[1624] The multi-chain chimeric polypeptide of embodiment C27, wherein the first chimeric polypeptide further comprises a linker sequence disposed between the at least one additional target-binding domain and the first target-binding domain or the first domain of the pair of affinity domains in the first chimeric polypeptide.

### Embodiment C30

[1625] The multi-chain chimeric polypeptide of embodiment C27, wherein the at least one additional target-binding domain of the one or more additional target-binding domains disposed at the C-terminus directly abuts the first target-binding domain or the first domain of the pair of affinity domains in the first chimeric polypeptide.

### Embodiment C31

[1626] The multi-chain chimeric polypeptide of embodiment C27, wherein the first chimeric polypeptide further comprises a linker sequence disposed between the at least one additional target-binding domain and the first target-binding domain or the first domain of the pair of affinity domains in the first chimeric polypeptide.

### Embodiment C32

[1627] The multi-chain chimeric polypeptide of embodiment C27, wherein the at least one of the one or more additional target-binding domains positioned between the soluble tissue factor domain and the first domain of the pair of affinity domains, directly abuts the soluble tissue factor domain and/or the first domain of the pair of affinity domains.

### Embodiment C33

[1628] The multi-chain chimeric polypeptide of embodiment C27, wherein the first chimeric polypeptide further comprises a linker sequence disposed (i) between the soluble tissue factor domain and the at least one of the one or more additional target-binding domains positioned between the soluble tissue factor domain and the first domain of the pair of affinity domains, and/or (ii) between the first domain of the pair of affinity domains and the at least one of the one or more additional target-binding domains positioned between the soluble tissue factor domain and the first domain of the pair of affinity domains.

### Embodiment C34

[1629] The multi-chain chimeric polypeptide of any one of embodiments C1-C33, wherein the second chimeric polypeptide further comprises one or more additional target-binding domains at the N-terminal end or the C-terminal end of the second chimeric polypeptide.

### Embodiment C35

[1630] The multi-chain chimeric polypeptide of embodiment C34, wherein at least one of the one or more additional target-binding domains directly abuts the second domain of the pair of affinity domains in the second chimeric polypeptide.

### Embodiment C36

[1631] The multi-chain chimeric polypeptide of embodiment C34, wherein the second chimeric polypeptide further comprises a linker sequence between at least one of the one or more additional target-binding domains and the second domain of the pair of affinity domains in the second chimeric polypeptide.

### Embodiment C37

[1632] The multi-chain chimeric polypeptide of embodiment C34, wherein at least one of the one or more additional target-binding domains directly abuts the second target-binding domain in the second chimeric polypeptide.

### Embodiment C38

[1633] The multi-chain chimeric polypeptide of embodiment C34, wherein the second chimeric polypeptide further comprises a linker sequence between at least one of the one or more additional target-binding domains and the second target-binding domain in the second chimeric polypeptide.

### Embodiment C39

[1634] The multi-chain chimeric polypeptide of any one of embodiments C20-C38, wherein two or more of the first target-binding domain, the second target-binding domain, and the one or more additional target-binding domains bind specifically to the same antigen.

### Embodiment C40

[1635] The multi-chain chimeric polypeptide of embodiment C39, wherein two or more of the first target-binding domain, the second target-binding domain, and the one or more additional target-binding domains bind specifically to the same epitope.

### Embodiment C41

[1636] The multi-chain chimeric polypeptide of embodiment C40, wherein two or more of the first target-binding domain, the second target-binding domain, and the one or more additional target-binding domains comprise the same amino acid sequence.

### Embodiment C42

[1637] The multi-chain chimeric polypeptide of embodiment C39, wherein the first target-binding domain, the second target-binding domain, and the one or more additional target-binding domains each bind specifically to the same antigen.

### Embodiment C43

[1638] The multi-chain chimeric polypeptide of embodiment C42, wherein the first target-binding domain, the second target-binding domain, and the one or more additional target-binding domains each bind specifically to the same epitope.

### Embodiment C44

[1639] The multi-chain chimeric polypeptide of embodiment C43, wherein the first target-binding domain, the second target-binding domain, and the one or more additional target-binding domains each comprise the same amino acid sequence.

### Embodiment C45

[1640] The multi-chain chimeric polypeptide of any one of embodiments C20-C38, wherein the first target-binding domain, the second target-binding domain, and the one or more additional target-binding domains bind specifically to different antigens.

### Embodiment C46

[1641] The multi-chain chimeric polypeptide of any one of embodiments C20-C45, wherein one or more of the first target-binding domain, the second target-binding domain, and the one or more target-binding domains is an antigen-binding domain.

### Embodiment C47

[1642] The multi-chain chimeric polypeptide of embodiment C46, wherein the first target-binding domain, the second target-binding domain, and the one or more additional target-binding domains are each an antigen-binding domain.

### Embodiment C48

[1643] The multi-chain chimeric polypeptide of embodiment C47, wherein antigen-binding domain comprises a scFv.

### Embodiment C49

[1644] The multi-chain chimeric polypeptide of any one of embodiments C20-C48, wherein one or more of the first target-binding domain, the second target-binding domain, and the one or more target-binding domains bind specifically to a target selected from the group consisting of: CD16a, CD28, CD3, CD33, CD20, CD19, CD22, CD123, IL-1R, IL-1, VEGF, IL-6R, IL-4, IL-10, PDL-1, TIGIT, PD-1, TIM3, CTLA4, MICA, MICB, IL-6, IL-8, TNFα, CD26, CD36, ULBP2, CD30, CD200, IGF-1R, MUC4AC, MUC5AC, Trop-2, CMET, EGFR, HER1, HER2, HER3, PSMA, CEA, B7H3, EPCAM, BCMA, P-cadherin, CEACAM5, a UL16-binding protein, HLA-DR, DLL4, TYRO3, AXL, MER, CD122, CD155, PDGF-DD, a ligand of TGF-β receptor II (TGF-βRII), a ligand of TGF-βRIII, a ligand of DNAM1, a ligand of NKp46, a ligand of NKp44, a ligand of NKG2D, a ligand of NKp30, a ligand for a scMHCI, a ligand for a scMHCII, a ligand for a scTCR, a receptor for IL-1, a receptor for IL-2, a receptor for IL-3, a receptor for IL-7, a receptor for IL-8, a receptor for IL-10, a receptor for IL-12, a receptor for IL-15, a receptor for IL-17, a receptor for IL-18, a receptor for IL-21, a receptor for PDGF-DD, a receptor for stem cell factor (SCF), a receptor for stem cell-like tyrosine kinase 3 ligand (FLT3L), a receptor for MICA, a receptor for MICB, a receptor for a ULP16-binding protein, a receptor for CD155, a receptor for CD122, and a receptor for CD3, and a receptor for CD28.

### Embodiment C50

[1645] The multi-chain chimeric polypeptide of any one of embodiments C20-C48, wherein one or more of the first target-binding domain, the second target-binding domain, and the one or more additional target-binding domains is a soluble interleukin or cytokine protein.

### Embodiment C51

[1646] The multi-chain chimeric polypeptide of embodiment C50, wherein the soluble interleukin, cytokine, or ligand protein is selected from the group consisting of: IL-1, IL-2, IL-3, IL-7, IL-8, IL-10, IL-12, IL-15, IL-17, IL-18, IL-21, PDGF-DD, and SCF, FLT3L, MICA, MICB, and a ULP16-binding protein.

### Embodiment C52

[1647] The multi-chain chimeric polypeptide of any one of embodiments C20-C48, wherein one or more of the first target-binding domain, the second target-binding domain, and the one or more additional target-binding domains is a soluble interleukin or cytokine receptor.

### Embodiment C53

[1648] The multi-chain chimeric polypeptide of embodiment C52, wherein the soluble receptor is a soluble TGF-β receptor II (TGF-β MI), a soluble TGF-βRIII, a soluble NKG2D, a soluble NKp30, a soluble NKp44, a soluble NKp46, a soluble DNAM1, a scMHCI, a scMHCII, a scTCR, a soluble CD155, a soluble CD122, a soluble CD3, or a soluble CD28.

### Embodiment C54

[1649] The multi-chain chimeric polypeptide of any one of embodiments C1-053, wherein the first chimeric polypeptide further comprises a peptide tag at the N-terminal end or the C-terminal end of the first chimeric polypeptide.

### Embodiment C55

[1650] The multi-chain chimeric polypeptide of any one of embodiments C1-053, wherein the second chimeric polypeptide further comprises a peptide tag at the N-terminal end or the C-terminal end of the second chimeric polypeptide.

### Embodiment C56

[1651] The multi-chain chimeric polypeptide of any one of embodiments C1-055, wherein the soluble tissue factor domain is a soluble human tissue factor domain.

### Embodiment C57

[1652] The multi-chain chimeric polypeptide of embodiment C56, wherein the soluble human tissue factor domain comprises a sequence that is at least 80% identical to SEQ ID NO: 93.

### Embodiment C58

[1653] The multi-chain chimeric polypeptide of embodiment C57, wherein the soluble human tissue factor domain comprises a sequence that is at least 90% identical to SEQ ID NO: 93.

### Embodiment C59

[1654] The multi-chain chimeric polypeptide of embodiment C58, wherein the soluble human tissue factor domain comprises a sequence that is at least 95% identical to SEQ ID NO: 93.

### Embodiment C60

[1655] The multi-chain chimeric polypeptide of any one of embodiments C56-059, wherein the soluble human tissue factor domain does not comprise one or more of:

[1656] a lysine at an amino acid position that corresponds to amino acid position 20 of mature wildtype human tissue factor protein;

[1657] an isoleucine at an amino acid position that corresponds to amino acid position 22 of mature wildtype human tissue factor protein;

[1658] a tryptophan at an amino acid position that corresponds to amino acid position 45 of mature wildtype human tissue factor protein;

[1659] an aspartic acid at an amino acid position that corresponds to amino acid position 58 of mature wildtype human tissue factor protein;

[1660] a tyrosine at an amino acid position that corresponds to amino acid position 94 of mature wildtype human tissue factor protein;

[1661] an arginine at an amino acid position that corresponds to amino acid position 135 of mature wildtype human tissue factor protein; and

[1662] a phenylalanine at an amino acid position that corresponds to amino acid position 140 of mature wildtype human tissue factor protein.

### Embodiment C61

[1663] The multi-chain chimeric polypeptide of embodiment C60, wherein the soluble human tissue factor domain does not comprise any of:

[1664] a lysine at an amino acid position that corresponds to amino acid position 20 of mature wildtype human tissue factor protein;

[1665] an isoleucine at an amino acid position that corresponds to amino acid position 22 of mature wildtype human tissue factor protein;

[1666] a tryptophan at an amino acid position that corresponds to amino acid position 45 of mature wildtype human tissue factor protein;

[1667] an aspartic acid at an amino acid position that corresponds to amino acid position 58 of mature wildtype human tissue factor protein;

[1668] a tyrosine at an amino acid position that corresponds to amino acid position 94 of mature wildtype human tissue factor protein;

[1669] an arginine at an amino acid position that corresponds to amino acid position 135 of mature wildtype human tissue factor protein; and

[1670] a phenylalanine at an amino acid position that corresponds to amino acid position 140 of mature wildtype human tissue factor protein.

### Embodiment C62

[1671] The multi-chain chimeric polypeptide of any one of embodiments C1-C61, wherein the soluble tissue factor domain is not capable of binding to Factor VIIa.

### Embodiment C63

[1672] The multi-chain chimeric polypeptide of any one of embodiments C1-C62, wherein the soluble tissue factor domain does not convert inactive Factor X into Factor Xa.

### Embodiment C64

[1673] The multi-chain chimeric polypeptide of any one of embodiments C1-C63, wherein the multi-chain chimeric polypeptide does not stimulate blood coagulation in a mammal.

### Embodiment C65

[1674] The multi-chain chimeric polypeptide of any one of embodiments C1-C64, wherein the pair of affinity domains is a sushi domain from an alpha chain of human IL-15 receptor (IL-15Rα) and a soluble IL-15.

### Embodiment C66

[1675] The multi-chain chimeric polypeptide of embodiment C65, wherein the soluble IL-15 has a D8N or D8A amino acid substitution.

### Embodiment C67

[1676] The multi-chain chimeric polypeptide of embodiment C65 or C66, wherein the human IL-15Rα is a mature full-length IL-15Rα.

### Embodiment C68

[1677] The multi-chain chimeric polypeptide of any one of embodiments C1-C64, wherein the pair of affinity domains is selected from the group consisting of: barnase and barnstar, a PKA and an AKAP, adapter/docking tag modules based on mutated RNase I fragments, and SNARE modules based on interactions of the proteins syntaxin, synaptotagmin, synaptobrevin, and SNAP25.

### Embodiment C69

[1678] The multi-chain chimeric polypeptide of any one of embodiments C1-C68, wherein the first chimeric polypeptide and/or the second chimeric polypeptide further comprises a signal sequence at its N-terminal end.

### Embodiment C70

[1679] A composition comprising any of the multi-chain chimeric polypeptides of embodiments C1-C69.

### Embodiment C71

[1680] The composition of embodiment C70, wherein the composition is a pharmaceutical composition.

### Embodiment C72

[1681] A kit comprising at least one dose of the composition of embodiment C70 or C71.

### Embodiment C73

[1682] Nucleic acid encoding any of the multi-chain chimeric polypeptides of any one of embodiments C1-C69.

### Embodiment C74

[1683] A vector comprising the nucleic acid of embodiment C73.

### Embodiment C75

[1684] The vector of embodiment C74, wherein the vector is an expression vector.

### Embodiment C76

[1685] A cell comprising the nucleic acid of embodiment C73 or the vector of embodiment C74 or C75.

### Embodiment C77

[1686] A method of producing a multi-chain chimeric polypeptide, the method comprising:

[1687] culturing the cell of embodiment C76 in a culture medium under conditions sufficient to result in the production of the multi-chain chimeric polypeptide; and

[1688] recovering the multi-chain chimeric polypeptide from the cell and/or the culture medium.

### Embodiment C78

[1689] A multi-chain chimeric polypeptide produced by the method of embodiment C77.

### Embodiment C79

[1690] The multi-chain chimeric polypeptide of embodiment A56, wherein the soluble human tissue factor domain comprises a sequence that is at least 80% identical to SEQ ID NO: 97.

### Embodiment C80

[1691] The multi-chain chimeric polypeptide of embodiment C79, wherein the soluble human tissue factor domain comprises a sequence that is at least 90% identical to SEQ ID NO: 97.

### Embodiment C81

[1692] The multi-chain chimeric polypeptide of embodiment C80, wherein the soluble human tissue factor domain comprises a sequence that is at least 95% identical to SEQ ID NO: 97.

### Embodiment C82

[1693] The multi-chain chimeric polypeptide of embodiment C81, wherein the soluble human tissue factor domain comprises a sequence that is 100% identical to SEQ ID NO: 97.

### Embodiment C83

[1694] The multi-chain chimeric polypeptide of embodiment C56, wherein the soluble human tissue factor domain comprises a sequence that is at least 80% identical to SEQ ID NO: 98.

### Embodiment C84

[1695] The multi-chain chimeric polypeptide of embodiment C83, wherein the soluble human tissue factor domain comprises a sequence that is at least 90% identical to SEQ ID NO: 98.

### Embodiment C85

[1696] The multi-chain chimeric polypeptide of embodiment C84, wherein the soluble human tissue factor domain comprises a sequence that is at least 95% identical to SEQ ID NO: 98.

### Embodiment C86

[1697] The multi-chain chimeric polypeptide of embodiment C85, wherein the soluble human tissue factor domain comprises a sequence that is 100% identical to SEQ ID NO: 98.

### Embodiment D1

[1698] A multi-chain chimeric polypeptide comprising:

[1699] (a) a first chimeric polypeptide comprising:
[1700] (i) a first target-binding domain;
[1701] (ii) a soluble tissue factor domain; and
[1702] (iii) a first domain of a pair of affinity domains;

[1703] (b) a second chimeric polypeptide comprising:
[1704] (i) a second domain of a pair of affinity domains; and
[1705] (ii) a second target-binding domain,

[1706] wherein:

[1707] the first chimeric polypeptide and the second chimeric polypeptide associate through the binding of the first domain and the second domain of the pair of affinity domains;

[1708] the first target-binding domain and the second targeting-binding domain each independently bind specifically to a receptor of IL-18 or a receptor of IL-12.

### Embodiment D2

[1709] The multi-chain chimeric polypeptide of embodiment D1, wherein the first target-binding domain and the soluble tissue factor domain directly abut each other in the first chimeric polypeptide.

### Embodiment D3

[1710] The multi-chain chimeric polypeptide of embodiment D1, wherein the first chimeric polypeptide further comprises a linker sequence between the first target-binding domain and the soluble tissue factor domain in the first chimeric polypeptide.

### Embodiment D4

[1711] The multi-chain chimeric polypeptide of any one of embodiments D1-D3, wherein the soluble tissue factor domain and the first domain of the pair of affinity domains directly abut each other in the first chimeric polypeptide.

### Embodiment D5

[1712] The multi-chain chimeric polypeptide of any one of embodiments D1-D3, wherein the first chimeric polypeptide further comprises a linker sequence between the soluble tissue factor domain and the first domain of the pair of affinity domains in the first chimeric polypeptide.

### Embodiment D6

[1713] The multi-chain chimeric polypeptide of any one of embodiments D1-D5, wherein the second domain of the pair of affinity domains and the second target-binding domain directly abut each other in the second chimeric polypeptide.

### Embodiment D7

[1714] The multi-chain chimeric polypeptide of any one of embodiments D1-D5, wherein second chimeric polypeptide further comprises a linker sequence between the second domain of the pair of affinity domains and the second target-binding domain in the second chimeric polypeptide.

### Embodiment D8

[1715] The multi-chain chimeric polypeptide of any one of embodiments D1-D7, wherein the soluble tissue factor domain is a soluble human tissue factor domain.

### Embodiment D9

[1716] The multi-chain chimeric polypeptide of embodiment D8, wherein the soluble human tissue factor domain comprises a sequence that is at least 80% identical to SEQ ID NO: 93.

### Embodiment D10

[1717] The multi-chain chimeric polypeptide of embodiment D9, wherein the soluble human tissue factor domain comprises a sequence that is at least 90% identical to SEQ ID NO: 93.

### Embodiment D11

[1718] The multi-chain chimeric polypeptide of embodiment D10, wherein the soluble human tissue factor domain comprises a sequence that is at least 95% identical to SEQ ID NO: 93.

### Embodiment D12

[1719] The multi-chain chimeric polypeptide of any one of embodiments D8-D11, wherein the soluble human tissue factor domain does not comprise one or more of:

[1720] a lysine at an amino acid position that corresponds to amino acid position 20 of mature wildtype human tissue factor protein;

[1721] an isoleucine at an amino acid position that corresponds to amino acid position 22 of mature wildtype human tissue factor protein;

[1722] a tryptophan at an amino acid position that corresponds to amino acid position 45 of mature wildtype human tissue factor protein;

[1723] an aspartic acid at an amino acid position that corresponds to amino acid position 58 of mature wildtype human tissue factor protein;

[1724] a tyrosine at an amino acid position that corresponds to amino acid position 94 of mature wildtype human tissue factor protein;

[1725] an arginine at an amino acid position that corresponds to amino acid position 135 of mature wildtype human tissue factor protein; and

[1726] a phenylalanine at an amino acid position that corresponds to amino acid position 140 of mature wildtype human tissue factor protein.

### Embodiment D13

[1727] The multi-chain chimeric polypeptide of embodiment D12, wherein the soluble human tissue factor domain does not comprise any of:

[1728] a lysine at an amino acid position that corresponds to amino acid position 20 of mature wildtype human tissue factor protein;

[1729] an isoleucine at an amino acid position that corresponds to amino acid position 22 of mature wildtype human tissue factor protein;

[1730] a tryptophan at an amino acid position that corresponds to amino acid position 45 of mature wildtype human tissue factor protein;

[1731] an aspartic acid at an amino acid position that corresponds to amino acid position 58 of mature wildtype human tissue factor protein;

[1732] a tyrosine at an amino acid position that corresponds to amino acid position 94 of mature wildtype human tissue factor protein;

[1733] an arginine at an amino acid position that corresponds to amino acid position 135 of mature wildtype human tissue factor protein; and

[1734] a phenylalanine at an amino acid position that corresponds to amino acid position 140 of mature wildtype human tissue factor protein.

### Embodiment D14

[1735] The multi-chain chimeric polypeptide of any one of embodiments D1-D13, wherein the soluble tissue factor domain is not capable of binding to Factor VIIa.

### Embodiment D15

[1736] The multi-chain chimeric polypeptide of any one of embodiments D1-D14, wherein the soluble tissue factor domain does not convert inactive Factor X into Factor Xa.

### Embodiment D16

[1737] The multi-chain chimeric polypeptide of any one of embodiments D1-D15, wherein the multi-chain chimeric polypeptide does not stimulate blood coagulation in a mammal.

### Embodiment D17

[1738] The multi-chain chimeric polypeptide of any one of embodiments D1-D16, wherein the first chimeric polypeptide further comprises a peptide tag at the N-terminal end or the C-terminal end of the first chimeric polypeptide.

### Embodiment D18

[1739] The multi-chain chimeric polypeptide of any one of embodiments D1-D17, wherein the second chimeric polypeptide further comprises a peptide tag at the N-terminal end or the C-terminal end of the second chimeric polypeptide.

### Embodiment D19

[1740] The multi-chain chimeric polypeptide of any one of embodiments D1-D18, wherein the first chimeric polypeptide and/or the second chimeric polypeptide further comprises a signal sequence at its N-terminal end.

### Embodiment D20

[1741] The multi-chain chimeric polypeptide of embodiment D19, wherein the signal sequence comprises SEQ ID NO: 117.

### Embodiment D21

[1742] The multi-chain chimeric polypeptide of embodiment D20, wherein the signal sequence is SEQ ID NO: 117.

### Embodiment D22

[1743] The multi-chain chimeric polypeptide of any one of embodiments D1-D21, wherein the pair of affinity domains is a sushi domain from an alpha chain of human IL-15 receptor (IL-15Rα) and a soluble IL-15.

### Embodiment D23

[1744] The multi-chain chimeric polypeptide of embodiment D22, wherein the soluble IL-15 has a D8N or D8A amino acid substitution.

### Embodiment D24

[1745] The multi-chain chimeric polypeptide of embodiment D22, wherein the soluble IL-15 comprises a sequence that is 80% identical to SEQ ID NO: 82.

### Embodiment D25

[1746] The multi-chain chimeric polypeptide of embodiment D24, wherein the soluble IL-15 comprises a sequence that is 90% identical to SEQ ID NO: 82.

### Embodiment D26

[1747] The multi-chain chimeric polypeptide of embodiment D25, wherein the soluble IL-15 comprises a sequence that is 95% identical to SEQ ID NO: 82.

### Embodiment D27

[1748] The multi-chain chimeric polypeptide of embodiment D26, wherein the soluble IL-15 comprises SEQ ID NO: 82.

### Embodiment D28

[1749] The multi-chain chimeric polypeptide of any one of embodiments D22-D27, wherein the sushi domain of IL-15Rα comprises a sushi domain from human IL-15Rα.

### Embodiment D29

[1750] The multi-chain chimeric polypeptide of embodiment D28, wherein the sushi domain from human IL-15Rα comprises a sequence that is 80% identical to SEQ ID NO: 113.

### Embodiment D30

[1751] The multi-chain chimeric polypeptide of embodiment D29, wherein the sushi domain from human IL-15Rα comprises a sequence that is 90% identical to SEQ ID NO: 113.

### Embodiment D31

[1752] The multi-chain chimeric polypeptide of embodiment D30, wherein the sushi domain from human IL-15Rα comprises a sequence that is 95% identical to SEQ ID NO: 113.

### Embodiment D32

[1753] The multi-chain chimeric polypeptide of embodiment D31, wherein the sushi domain from human IL-15Rα comprises SEQ ID NO: 113.

### Embodiment D33

[1754] The multi-chain chimeric polypeptide of embodiment D28, wherein the sushi domain from human IL-15Rα is a mature full-length IL-15Rα.

### Embodiment D34

[1755] The multi-chain chimeric polypeptide of any one of embodiments D1-D21, wherein the pair of affinity domains is selected from the group consisting of: barnase and barnstar, a PKA and an AKAP, adapter/docking tag modules based on mutated RNase I fragments, and SNARE modules based on interactions of the proteins syntaxin, synaptotagmin, synaptobrevin, and SNAP25.

### Embodiment D35

[1756] The multi-chain chimeric polypeptide of any one of embodiments D1-D34, wherein one or both of the first target-binding domain and the second target-binding domain is an agonistic antigen-binding domain.

### Embodiment D36

[1757] The multi-chain chimeric polypeptide of embodiment D35, wherein the first target-binding domain and the second target-binding domain are each agonistic antigen-binding domains.

### Embodiment D37

[1758] The multi-chain chimeric polypeptide of embodiment D35 or D36, wherein antigen-binding domain comprises a scFv or single-domain antibody.

### Embodiment D38

[1759] The multi-chain chimeric polypeptide of any one of embodiments D1-D34, wherein one or both of the first target-binding domain and the second target-binding domain is a soluble IL-15 or a soluble IL-18.

### Embodiment D39

[1760] The multi-chain chimeric polypeptide of embodiment D38, wherein the first target-binding domain and the second target-binding domain are each independently a soluble IL-15 or a soluble IL-18.

### Embodiment D40

[1761] The multi-chain chimeric polypeptide of any one of embodiments D1-D39, wherein the first target-binding domain and the second target-binding domain both bind specifically to a receptor of IL-18 or a receptor of IL-12.

### Embodiment D41

[1762] The multi-chain chimeric polypeptide of embodiment B40, wherein the first target-binding domain and the second target-binding domain bind specifically to the same epitope.

### Embodiment D42

[1763] The multi-chain chimeric polypeptide of embodiment D41, wherein the first target-binding domain and the second target-binding domain comprise the same amino acid sequence.

### Embodiment D43

[1764] The multi-chain chimeric polypeptide of any one of embodiments D1-D39, wherein the first target-binding domain binds specifically to a receptor for IL-12, and the second target-binding domain binds specifically to a receptor for IL-18.

### Embodiment D44

[1765] The multi-chain chimeric polypeptide of any one of embodiments D1-D39, wherein the first target-binding domain binds specifically to a receptor for IL-18, and the second target-binding domain bind specifically to a receptor for IL-12.

### Embodiment D45

[1766] The multi-chain chimeric polypeptide of embodiment D44, wherein the first target-binding domain comprises a soluble IL-18.

### Embodiment D46

[1767] The multi-chain chimeric polypeptide of embodiment D45, wherein the soluble IL-18 is a soluble human IL-18.

### Embodiment D47

[1768] The multi-chain chimeric polypeptide of embodiment D46, wherein the soluble human IL-18 comprises a sequence at least 80% identical to SEQ ID NO: 109.

### Embodiment D48

[1769] The multi-chain chimeric polypeptide of embodiment D47, wherein the soluble human IL-18 comprises a sequence at least 90% identical to SEQ ID NO: 109.

### Embodiment D49

[1770] The multi-chain chimeric polypeptide of embodiment D48, wherein the soluble human IL-18 comprises a sequence at least 95% identical to SEQ ID NO: 109.

### Embodiment D50

[1771] The multi-chain chimeric polypeptide of embodiment D49, wherein the soluble human IL-18 comprises a sequence of SEQ ID NO: 109.

### Embodiment D51

[1772] The multi-chain chimeric polypeptide of any one of embodiments D44-D50, wherein the second target-binding domain comprises a soluble IL-12.

### Embodiment D52

[1773] The multi-chain chimeric polypeptide of embodiment D51, wherein the soluble IL-18 is a soluble human IL-12.

### Embodiment D53

[1774] The multi-chain chimeric polypeptide of embodiment D52, wherein the soluble human IL-15 comprises a sequence of soluble human IL-12β (p40) and a sequence of soluble human IL-12α (p35).

### Embodiment D54

[1775] The multi-chain chimeric polypeptide of embodiment D53, wherein the soluble human IL-15 further comprises a linker sequence between the sequence of soluble IL-12β (p40) and the sequence of soluble human IL-12α (p35).

### Embodiment D55

[1776] The multi-chain chimeric polypeptide of embodiment D54, wherein the linker sequence comprises SEQ ID NO: 102.

### Embodiment D56

[1777] The multi-chain chimeric polypeptide of any one of embodiments D53-D55, wherein the sequence of soluble human IL-12β (p40) comprises a sequence that is at least 80% identical to SEQ ID NO: 81.

### Embodiment D57

[1778] The multi-chain chimeric polypeptide of embodiment D56, wherein the sequence of soluble human IL-12β (p40) comprises a sequence that is at least 90% identical to SEQ ID NO: 81.

### Embodiment D58

[1779] The multi-chain chimeric polypeptide of embodiment D57, wherein the sequence of soluble human IL-12β (p40) comprises a sequence that is at least 95% identical to SEQ ID NO: 81.

### Embodiment D59

[1780] The multi-chain chimeric polypeptide of embodiment D58, wherein the sequence of soluble human IL-12β (p40) comprises SEQ ID NO: 81.

### Embodiment D60

[1781] The multi-chain chimeric polypeptide of any one of embodiments D53-D59, wherein the sequence of soluble human IL-12α (p35) comprises a sequence that is at least 80% identical to SEQ ID NO: 80.

### Embodiment D61

[1782] The multi-chain chimeric polypeptide of embodiment D60, wherein the sequence of soluble human IL-12α (p35) comprises a sequence that is at least 90% identical to SEQ ID NO: 80.

### Embodiment D62

[1783] The mule-chain chimeric polypeptide of embodiment D61, wherein the sequence of soluble human IL-12α (p35) comprises a sequence that is at least 95% identical to SEQ ID NO: 80.

### Embodiment D63

[1784] The multi-chain chimeric polypeptide of embodiment D62, wherein the sequence of soluble human IL-12α (p35) comprises SEQ ID NO: 80.

### Embodiment D64

[1785] The multi-chain chimeric polypeptide of embodiment D1, wherein the first chimeric polypeptide comprises a sequence that is at least 80% identical to SEQ ID NO: 174.

### Embodiment D65

[1786] The multi-chain chimeric polypeptide of embodiment D64, wherein the first chimeric polypeptide comprises a sequence that is at least 90% identical to SEQ ID NO: 174.

### Embodiment D66

[1787] The multi-chain chimeric polypeptide of embodiment D65, wherein the first chimeric polypeptide comprises a sequence that is at least 95% identical to SEQ ID NO: 174.

### Embodiment D67

[1788] The multi-chain chimeric polypeptide of embodiment D66, wherein the first chimeric polypeptide comprises SEQ ID NO: 174.

### Embodiment D68

[1789] The multi-chain chimeric polypeptide of embodiment D67, wherein the first chimeric polypeptide comprises SEQ ID NO: 176.

### Embodiment D69

[1790] The multi-chain chimeric polypeptide of any one of embodiments D1 and D64-D68, wherein the second chimeric polypeptide comprises a sequence that is at least 80% identical to SEQ ID NO: 178.

### Embodiment D70

[1791] The multi-chain chimeric polypeptide of embodiment D69, wherein the second chimeric polypeptide comprises a sequence that is at least 90% identical to SEQ ID NO: 178.

### Embodiment D71

[1792] The multi-chain chimeric polypeptide of embodiment D70, wherein the second chimeric polypeptide comprises a sequence that is at least 95% identical to SEQ ID NO: 178.

### Embodiment D72

[1793] The multi-chain chimeric polypeptide of embodiment D71, wherein the second chimeric polypeptide comprises SEQ ID NO: 178.

### Embodiment D73

[1794] The multi-chain chimeric polypeptide of embodiment D72, wherein the second chimeric polypeptide comprises SEQ ID NO: 180.

### Embodiment D74

[1795] The multi-chain chimeric polypeptide of any one of embodiments D1-D63, wherein the first chimeric polypeptide further comprises one or more additional target-binding domain(s), where at least one of the one or more additional antigen-binding domain(s) is positioned between the soluble tissue factor domain and the first domain of the pair of affinity domains.

### Embodiment D75

[1796] The multi-chain chimeric polypeptide of embodiment D74, wherein the first chimeric polypeptide further comprises a linker sequence between the soluble tissue factor domain and the at least one of the one or more additional antigen-binding domain(s), and/or a linker sequence between the at least one of the one or more additional antigen-binding domain(s) and the first domain of the pair of affinity domains.

### Embodiment D76

[1797] The multi-chain chimeric polypeptide of any one of embodiments D1-D63, wherein the first chimeric polypeptide further comprises one or more additional target-binding domains at the N-terminal and/or C-terminal end of the first chimeric polypeptide.

### Embodiment D77

[1798] The multi-chain chimeric polypeptide of embodiment D76, wherein at least one of the one or more additional target-binding domains directly abuts the first domain of the pair of affinity domains in the first chimeric polypeptide.

### Embodiment D78

[1799] The multi-chain chimeric polypeptide of embodiment D76, wherein the first chimeric polypeptide further comprises a linker sequence between the at least one of the one or more additional target-binding domains and the first domain of the pair of affinity domains.

### Embodiment D79

[1800] The multi-chain chimeric polypeptide of embodiment D76, wherein the at least one of the one or more additional target-binding domains directly abuts the first target-binding domain in the first chimeric polypeptide.

### Embodiment D80

[1801] The multi-chain chimeric polypeptide of embodiment D76, wherein the first chimeric polypeptide further comprises a linker sequence between the at least one of the one or more additional target-binding domains and the first target-binding domain.

### Embodiment D81

[1802] The multi-chain chimeric polypeptide of embodiment D76, wherein at least one of the one or more additional target-binding domains is disposed at the N- and/or C-terminus of the first chimeric polypeptide, and at least one of the one or more additional target-binding domains is positioned between the soluble tissue factor domain and the first domain of the pair of affinity domains in the first chimeric polypeptide.

### Embodiment D82

[1803] The multi-chain chimeric polypeptide of embodiment D81, wherein the at least one additional target-binding domain of the one or more additional target-binding domains disposed at the N-terminus directly abuts the first target-binding domain or the first domain of the pair of affinity domains in the first chimeric polypeptide.

### Embodiment D83

[1804] The multi-chain chimeric polypeptide of embodiment D81, wherein the first chimeric polypeptide further comprises a linker sequence disposed between the at least one additional target-binding domain and the first target-binding domain or the first domain of the pair of affinity domains in the first chimeric polypeptide.

### Embodiment D84

[1805] The multi-chain chimeric polypeptide of embodiment D81, wherein the at least one additional target-binding domain of the one or more additional target-binding domains disposed at the C-terminus directly abuts the first target-binding domain or the first domain of the pair of affinity domains in the first chimeric polypeptide.

### Embodiment D85

[1806] The multi-chain chimeric polypeptide of embodiment D81, wherein the first chimeric polypeptide further comprises a linker sequence disposed between the at least one additional target-binding domain and the first target-binding domain or the first domain of the pair of affinity domains in the first chimeric polypeptide.

### Embodiment D86

[1807] The multi-chain chimeric polypeptide of embodiment D81, wherein the at least one of the one or more additional target-binding domains positioned between the soluble tissue factor domain and the first domain of the pair of affinity domains, directly abuts the soluble tissue factor domain and/or the first domain of the pair of affinity domains.

### Embodiment D87

[1808] The multi-chain chimeric polypeptide of embodiment D81, wherein the first chimeric polypeptide further comprises a linker sequence disposed (i) between the soluble tissue factor domain and the at least one of the one or more additional target-binding domains positioned between the soluble tissue factor domain and the first domain of the pair of affinity domains, and/or (ii) between the first domain of the pair of affinity domains and the at least one of the one or more additional target-binding domains positioned between the soluble tissue factor domain and the first domain of the pair of affinity domains.

### Embodiment D88

[1809] The multi-chain chimeric polypeptide of any one of embodiments D1-D63 and D74-D87, wherein the second chimeric polypeptide further comprises one or more additional target-binding domains at the N-terminal end or the C-terminal end of the second chimeric polypeptide.

### Embodiment D89

[1810] The multi-chain chimeric polypeptide of embodiment D88, wherein at least one of the one or more additional target-binding domains directly abuts the second domain of the pair of affinity domains in the second chimeric polypeptide.

### Embodiment D90

[1811] The multi-chain chimeric polypeptide of embodiment D88, wherein the second chimeric polypeptide further comprises a linker sequence between at least one of the one or more additional target-binding domains and the second domain of the pair of affinity domains in the second chimeric polypeptide.

### Embodiment D91

[1812] The multi-chain chimeric polypeptide of embodiment D88, wherein at least one of the one or more additional target-binding domains directly abuts the second target-binding domain in the second chimeric polypeptide.

### Embodiment D92

[1813] The multi-chain chimeric polypeptide of embodiment D88, wherein the second chimeric polypeptide further comprises a linker sequence between at least one of the one or more additional target-binding domains and the second target-binding domain in the second chimeric polypeptide.

### Embodiment D93

[1814] The multi-chain chimeric polypeptide of any one of embodiments D74-D92, wherein two or more of the first target-binding domain, the second target-binding domain, and the one or more additional target-binding domains bind specifically to the same antigen.

### Embodiment D94

[1815] The multi-chain chimeric polypeptide of embodiment B93, wherein two or more of the first target-binding domain, the second target-binding domain, and the one or more additional target-binding domains bind specifically to the same epitope.

### Embodiment D95

[1816] The multi-chain chimeric polypeptide of embodiment B94, wherein two or more of the first target-binding domain, the second target-binding domain, and the one or more additional target-binding domains comprise the same amino acid sequence.

### Embodiment D96

[1817] The multi-chain chimeric polypeptide of any one of embodiments D74-D92, wherein the first target-binding domain, the second target-binding domain, and the one or more additional target-binding domains bind specifically to different antigens.

### Embodiment D97

[1818] The multi-chain chimeric polypeptide of any one of embodiments D74-D96, wherein the one or more additional antigen-binding domains bind specifically to a target selected from the group consisting of: CD16a, CD28, CD3, CD33, CD20, CD19, CD22, CD123, IL-1R, IL-1, VEGF, IL-6R, IL-4, IL-10, PDL-1, TIGIT, PD-1, TIM3, CTLA4, MICA, MICB, IL-6, IL-8, TNFα, CD26, CD36, ULBP2, CD30, CD200, IGF-1R, MUC4AC, MUC5AC, Trop-2, CMET, EGFR, HER1, HER2, HER3, PSMA, CEA, B7H3, EPCAM, BCMA, P-cadherin, CEACAM5, a UL16-binding protein, HLA-DR, DLL4, TYRO3, AXL, MER, CD122, CD155, PDGF-DD, a ligand of TGF-β receptor II (TGF-βRII), a ligand of TGF-βRIII, a ligand of DNAM1, a ligand of NKp46, a ligand of NKp44, a ligand of NKG2D, a ligand of NKp30, a ligand for a scMHCI, a ligand for a scMHCII, a ligand for a scTCR, a receptor for IL-1, a receptor for IL-2, a receptor for IL-3, a receptor for IL-7, a receptor for IL-8, a receptor for IL-10, a receptor for IL-12, a receptor for IL-15, a receptor for IL-17, a receptor for IL-18, a receptor for IL-21, a receptor for PDGF-DD, a receptor for stem cell factor (SCF), a receptor for stem cell-like tyrosine kinase 3 ligand (FLT3L), a receptor for MICA, a receptor for MICB, a receptor for a ULP16-binding protein, a receptor for CD155, and a receptor for CD28.

### Embodiment D98

[1819] The multi-chain chimeric polypeptide of any one of embodiments D74-D96, wherein the one or more additional target-binding domains is a soluble interleukin or cytokine protein.

### Embodiment D99

[1820] The multi-chain chimeric polypeptide of embodiment B98, wherein the soluble interleukin, cytokine, or ligand protein is selected from the group consisting of: IL-1, IL-2, IL-3, IL-7, IL-8, IL-10, IL-12, IL-15, IL-17, IL-18, IL-21, PDGF-DD, SCF, FLT3L, MICA, MICB, and a ULP16-binding protein.

### Embodiment D100

[1821] The multi-chain chimeric polypeptide of any one of embodiments D74-D96, wherein the one or more additional target-binding domains is a soluble interleukin or cytokine receptor.

### Embodiment D101

[1822] The multi-chain chimeric polypeptide of embodiment B100, wherein the soluble receptor is a soluble TGF-β receptor II (TGF-β RII), a soluble TGF-βRIII, a soluble NKG2D, a soluble NKp30, a soluble NKp44, a soluble NKp46, a soluble DNAM1, a scMHCI, a scMHCII, a scTCR, a soluble CD155, a soluble CD122, or a soluble CD28.

### Embodiment D102

[1823] A composition comprising any of the multi-chain chimeric polypeptides of embodiments D1-D101.

### Embodiment D103

[1824] The composition of embodiment D102, wherein the composition is a pharmaceutical composition.

### Embodiment D104

[1825] A kit comprising at least one dose of the composition of embodiment D102 or D103.

### Embodiment D105

[1826] Nucleic acid encoding any of the multi-chain chimeric polypeptides of any one of embodiments D1-D101.

### Embodiment D106

[1827] A vector comprising the nucleic acid of embodiment D105.

### Embodiment D107

[1828] The vector of embodiment D106, wherein the vector is an expression vector.

### Embodiment D108

[1829] A cell comprising the nucleic acid of embodiment D105 or the vector of embodiment D106 or D107.

### Embodiment D109

[1830] A method of producing a multi-chain chimeric polypeptide, the method comprising:

[1831] culturing the cell of embodiment D108 in a culture medium under conditions sufficient to result in the production of the multi-chain chimeric polypeptide; and

[1832] recovering the multi-chain chimeric polypeptide from the cell and/or the culture medium.

### Embodiment D110

[1833] A multi-chain chimeric polypeptide produced by the method of embodiment D109.

### Embodiment D111

[1834] The multi-chain chimeric polypeptide of embodiment D8, wherein the soluble human tissue factor domain comprises a sequence that is at least 80% identical to SEQ ID NO: 97.

### Embodiment D112

[1835] The multi-chain chimeric polypeptide of embodiment D111, wherein the soluble human tissue factor domain comprises a sequence that is at least 90% identical to SEQ ID NO: 97.

### Embodiment D113

[1836] The multi-chain chimeric polypeptide of embodiment D112, wherein the soluble human tissue factor domain comprises a sequence that is at least 95% identical to SEQ ID NO: 97.

### Embodiment D114

[1837] The multi-chain chimeric polypeptide of embodiment D113, wherein the soluble human tissue factor domain comprises a sequence that is 100% identical to SEQ ID NO: 97.

### Embodiment D115

[1838] The multi-chain chimeric polypeptide of embodiment D8, wherein the soluble human tissue factor domain comprises a sequence that is at least 80% identical to SEQ ID NO: 98.

### Embodiment D116

[1839] The multi-chain chimeric polypeptide of embodiment D115, wherein the soluble human tissue factor domain comprises a sequence that is at least 90% identical to SEQ ID NO: 98.

### Embodiment D117

[1840] The multi-chain chimeric polypeptide of embodiment D116, wherein the soluble human tissue factor domain comprises a sequence that is at least 95% identical to SEQ ID NO: 98.

### Embodiment D118

[1841] The multi-chain chimeric polypeptide of embodiment D117, wherein the soluble human tissue factor domain comprises a sequence that is 100% identical to SEQ ID NO: 98.

### Embodiment E1

[1842] A multi-chain chimeric polypeptide comprising:

[1843] (a) a first chimeric polypeptide comprising:
[1844] (i) a first target-binding domain;
[1845] (ii) a soluble tissue factor domain; and
[1846] (iii) a first domain of a pair of affinity domains;

[1847] (b) a second chimeric polypeptide comprising:
[1848] (i) a second domain of a pair of affinity domains; and
[1849] (ii) a second target-binding domain,

[1850] wherein:

[1851] the first chimeric polypeptide and the second chimeric polypeptide associate through the binding of the first domain and the second domain of the pair of affinity domains; and

[1852] the first target-binding domain and the second targeting-binding domain each independently bind specifically to a receptor of IL-21 or a ligand of tumor growth factor receptor 0 II (TGFβRII).

### Embodiment E2

[1853] The multi-chain chimeric polypeptide of embodiment E1, wherein the first target-binding domain and the soluble tissue factor domain directly abut each other in the first chimeric polypeptide.

### Embodiment E3

[1854] The multi-chain chimeric polypeptide of embodiments E1, wherein the first chimeric polypeptide further comprises a linker sequence between the first target-binding domain and the soluble tissue factor domain in the first chimeric polypeptide.

### Embodiment E4

[1855] The multi-chain chimeric polypeptide of any one of embodiments E1-E3, wherein the soluble tissue factor domain and the first domain of the pair of affinity domains directly abut each other in the first chimeric polypeptide.

### Embodiment E5

[1856] The multi-chain chimeric polypeptide of any one of embodiments E1-E3, wherein the first chimeric polypeptide further comprises a linker sequence between the soluble tissue factor domain and the first domain of the pair of affinity domains in the first chimeric polypeptide.

### Embodiment E6

[1857] The multi-chain chimeric polypeptide of any one of embodiments E1-E5, wherein the second domain of the pair of affinity domains and the second target-binding domain directly abut each other in the second chimeric polypeptide.

### Embodiment E7

[1858] The multi-chain chimeric polypeptide of any one of embodiments E1-E5, wherein second chimeric polypeptide further comprises a linker sequence between the second domain of the pair of affinity domains and the second target-binding domain in the second chimeric polypeptide.

### Embodiment E8

[1859] The multi-chain chimeric polypeptide of any one of embodiments E1-E7, wherein the soluble tissue factor domain is a soluble human tissue factor domain.

### Embodiment E9

[1860] The multi-chain chimeric polypeptide of embodiment E8, wherein the soluble human tissue factor domain comprises a sequence that is at least 80% identical to SEQ ID NO: 93.

### Embodiment E10

[1861] The multi-chain chimeric polypeptide of embodiment E9, wherein the soluble human tissue factor domain comprises a sequence that is at least 90% identical to SEQ ID NO: 93.

### Embodiment E11

[1862] The multi-chain chimeric polypeptide of embodiment E10, wherein the soluble human tissue factor domain comprises a sequence that is at least 95% identical to SEQ ID NO: 93.

### Embodiment E12

[1863] The multi-chain chimeric polypeptide of any one of embodiments E8-E11, wherein the soluble human tissue factor domain does not comprise one or more of:

[1864] a lysine at an amino acid position that corresponds to amino acid position 20 of mature wildtype human tissue factor protein;

[1865] an isoleucine at an amino acid position that corresponds to amino acid position 22 of mature wildtype human tissue factor protein;

[1866] a tryptophan at an amino acid position that corresponds to amino acid position 45 of mature wildtype human tissue factor protein;

[1867] an aspartic acid at an amino acid position that corresponds to amino acid position 58 of mature wildtype human tissue factor protein;

[1868] a tyrosine at an amino acid position that corresponds to amino acid position 94 of mature wildtype human tissue factor protein;

[1869] an arginine at an amino acid position that corresponds to amino acid position 135 of mature wildtype human tissue factor protein; and

[1870] a phenylalanine at an amino acid position that corresponds to amino acid position 140 of mature wildtype human tissue factor protein.

### Embodiment E13

[1871] The multi-chain chimeric polypeptide of embodiment E12, wherein the soluble human tissue factor domain does not comprise any of:

[1872] a lysine at an amino acid position that corresponds to amino acid position 20 of mature wildtype human tissue factor protein;

[1873] an isoleucine at an amino acid position that corresponds to amino acid position 22 of mature wildtype human tissue factor protein;

[1874] a tryptophan at an amino acid position that corresponds to amino acid position 45 of mature wildtype human tissue factor protein;

[1875] an aspartic acid at an amino acid position that corresponds to amino acid position 58 of mature wildtype human tissue factor protein;

[1876] a tyrosine at an amino acid position that corresponds to amino acid position 94 of mature wildtype human tissue factor protein;

[1877] an arginine at an amino acid position that corresponds to amino acid position 135 of mature wildtype human tissue factor protein; and

[1878] a phenylalanine at an amino acid position that corresponds to amino acid position 140 of mature wildtype human tissue factor protein.

### Embodiment E14

[1879] The multi-chain chimeric polypeptide of any one of embodiments E1-E13, wherein the soluble tissue factor domain is not capable of binding to Factor VIIa.

### Embodiment E15

[1880] The multi-chain chimeric polypeptide of any one of embodiments E1-E14, wherein the soluble tissue factor domain does not convert inactive Factor X into Factor Xa.

### Embodiment E16

[1881] The multi-chain chimeric polypeptide of any one of embodiments E1-E15, wherein the multi-chain chimeric polypeptide does not stimulate blood coagulation in a mammal.

### Embodiment E17

[1882] The multi-chain chimeric polypeptide of any one of embodiments E1-E16, wherein the first chimeric polypeptide further comprises a peptide tag at the N-terminal end or the C-terminal end of the first chimeric polypeptide.

### Embodiment E18

[1883] The multi-chain chimeric polypeptide of any one of embodiments E1-E17, wherein the second chimeric polypeptide further comprises a peptide tag at the N-terminal end or the C-terminal end of the second chimeric polypeptide.

### Embodiment E19

[1884] The multi-chain chimeric polypeptide of any one of embodiments E1-E18, wherein the first chimeric polypeptide and/or the second chimeric polypeptide further comprises a signal sequence at its N-terminal end.

### Embodiment E20

[1885] The multi-chain chimeric polypeptide of embodiment E19, wherein the signal sequence comprises SEQ ID NO: 117.

### Embodiment E21

[1886] The multi-chain chimeric polypeptide of embodiment E20, wherein the signal sequence is SEQ ID NO: 117.

### Embodiment E22

[1887] The multi-chain chimeric polypeptide of any one of embodiments E1-E21, wherein the pair of affinity domains is a sushi domain from an alpha chain of human IL-15 receptor (IL-15Rα and a soluble IL-15.

### Embodiment E23

[1888] The multi-chain chimeric polypeptide of embodiment E22, wherein the soluble IL-15 has a D8N or D8A amino acid substitution.

### Embodiment E24

[1889] The multi-chain chimeric polypeptide of embodiment E22, wherein the soluble IL-15 comprises a sequence that is 80% identical to SEQ ID NO: 82.

### Embodiment E25

[1890] The multi-chain chimeric polypeptide of embodiment E24, wherein the soluble IL-15 comprises a sequence that is 90% identical to SEQ ID NO: 82.

### Embodiment E26

[1891] The multi-chain chimeric polypeptide of embodiment E25, wherein the soluble IL-15 comprises a sequence that is 95% identical to SEQ ID NO: 82.

### Embodiment E27

[1892] The multi-chain chimeric polypeptide of embodiment E26, wherein the soluble IL-15 comprises SEQ ID NO: 82.

### Embodiment E28

[1893] The multi-chain chimeric polypeptide of any one of embodiments E22-E27, wherein the sushi domain of IL-15Rα comprises a sushi domain from human IL-15Rα.

### Embodiment E29

[1894] The multi-chain chimeric polypeptide of embodiment E28, wherein the sushi domain from human IL-15Rα comprises a sequence that is 80% identical to SEQ ID NO: 113.

### Embodiment E30

[1895] The multi-chain chimeric polypeptide of embodiment E29, wherein the sushi domain from human IL-15Rα comprises a sequence that is 90% identical to SEQ ID NO: 113.

### Embodiment E31

[1896] The multi-chain chimeric polypeptide of embodiment E30, wherein the sushi domain from human IL-15Rα comprises a sequence that is 95% identical to SEQ ID NO: 113.

### Embodiment E32

[1897] The multi-chain chimeric polypeptide of embodiment E31, wherein the sushi domain from human IL-15Rα comprises SEQ ID NO: 113.

### Embodiment E33

[1898] The multi-chain chimeric polypeptide of embodiment E28, wherein the sushi domain from human IL-15Rα is a mature full-length IL-15Rα.

### Embodiment E34

[1899] The multi-chain chimeric polypeptide of any one of embodiments E1-E21, wherein the pair of affinity domains is selected from the group consisting of: barnase and barnstar, a PKA and an AKAP, adapter/docking tag modules based on mutated RNase I fragments, and SNARE modules based on interactions of the proteins syntaxin, synaptotagmin, synaptobrevin, and SNAP25.

### Embodiment E35

[1900] The multi-chain chimeric polypeptide of any one of embodiments E1-E34, wherein one or both of the first target-binding domain and the second target-binding domain is an antigen-binding domain.

### Embodiment E36

[1901] The multi-chain chimeric polypeptide of embodiment E35, wherein the first target-binding domain and the second target-binding domain are antigen-binding domains.

### Embodiment E37

[1902] The multi-chain chimeric polypeptide of embodiment E35 or E36, wherein antigen-binding domain comprises a scFv or single-domain antibody.

### Embodiment E38

[1903] The multi-chain chimeric polypeptide of any one of embodiments E1-E34, wherein one or both of the first target-binding domain and the second target-binding domain is a soluble IL-21 or a soluble TGFβRII.

### Embodiment E39

[1904] The multi-chain chimeric polypeptide of any one of embodiments E1-E38, wherein the first target-binding domain and the second target-binding domain both bind specifically to a receptor of IL-21 or a ligand of TGFβRII.

### Embodiment E40

[1905] The multi-chain chimeric polypeptide of embodiment E39, wherein the first target-binding domain and the second target-binding domain bind specifically to the same epitope.

### Embodiment E41

[1906] The multi-chain chimeric polypeptide of embodiment E40, wherein the first target-binding domain and the second target-binding domain comprise the same amino acid sequence.

### Embodiment E42

[1907] The multi-chain chimeric polypeptide of any one of embodiments E1-E38, wherein the first target-binding domain binds specifically to a ligand of TGFβRII, and the second target-binding domain binds specifically to a receptor for IL-21.

### Embodiment E43

[1908] The multi-chain chimeric polypeptide of any one of embodiments E1-E38, wherein the first target-binding domain binds specifically to a receptor for IL-21, and the second target-binding domain bind specifically to a ligand of TGFβRII.

### Embodiment E44

[1909] The multi-chain chimeric polypeptide of embodiment E43, wherein the first target-binding domain comprises a soluble IL-21.

### Embodiment E45

[1910] The multi-chain chimeric polypeptide of embodiment E44, wherein the soluble IL-21 is a soluble human IL-21.

### Embodiment E46

[1911] The multi-chain chimeric polypeptide of embodiment E45, wherein the soluble human IL-21 comprises a sequence at least 80% identical to SEQ ID NO: 83.

### Embodiment E47

[1912] The multi-chain chimeric polypeptide of embodiment E46, wherein the soluble human IL-21 comprises a sequence at least 90% identical to SEQ ID NO: 83.

### Embodiment E48

[1913] The multi-chain chimeric polypeptide of embodiment E47, wherein the soluble human IL-21 comprises a sequence at least 95% identical to SEQ ID NO: 83.

### Embodiment E49

[1914] The multi-chain chimeric polypeptide of embodiment E48, wherein the soluble human IL-21 comprises a sequence of SEQ ID NO: 83.

### Embodiment E50

[1915] The multi-chain chimeric polypeptide of any one of embodiments E43-E49, wherein the second target-binding domain comprises a soluble TGFβRII.

### Embodiment E51

[1916] The multi-chain chimeric polypeptide of embodiment E50, wherein the soluble TGFβRII is a soluble human TGFβRII.

### Embodiment E52

[1917] The multi-chain chimeric polypeptide of embodiment E51, wherein the soluble human TGFβRII comprises a first sequence of soluble human TGFβRII and a second sequence of soluble human TGFβRII.

### Embodiment E53

[1918] The multi-chain chimeric polypeptide of embodiment E52, wherein the soluble human TGFβRII further comprises a linker sequence between the first sequence of soluble human TGFβRII and the second sequence of soluble human TGFβRII.

### Embodiment E54

[1919] The multi-chain chimeric polypeptide of embodiment E53, wherein the linker sequence comprises SEQ ID NO: 102.

### Embodiment E55

[1920] The multi-chain chimeric polypeptide of any one of embodiments E52-E54, wherein the first sequence of soluble human TGFβRII comprises a sequence that is at least 80% identical to SEQ ID NO: 183.

### Embodiment E56

[1921] The multi-chain chimeric polypeptide of embodiment E55, wherein the first sequence of soluble human TGFβRII comprises a sequence that is at least 90% identical to SEQ ID NO: 183.

### Embodiment E57

[1922] The multi-chain chimeric polypeptide of embodiment E56, wherein the first sequence of soluble human TGFβRII comprises a sequence that is at least 95% identical to SEQ ID NO: 183.

### Embodiment E58

[1923] The multi-chain chimeric polypeptide of embodiment E57, wherein the first sequence of soluble human TGFβRII comprises SEQ ID NO: 183.

### Embodiment E59

[1924] The multi-chain chimeric polypeptide of any one of embodiments E52-E58, wherein the second sequence of soluble human TGFβRII comprises a sequence that is at least 80% identical to SEQ ID NO: 184.

### Embodiment E60

[1925] The multi-chain chimeric polypeptide of embodiment E59, wherein the second sequence of soluble human TGFβRII comprises a sequence that is at least 90% identical to SEQ ID NO: 184.

### Embodiment E61

[1926] The mule-chain chimeric polypeptide of embodiment E60, wherein the second sequence of soluble human TGFβRII comprises a sequence that is at least 95% identical to SEQ ID NO: 184.

### Embodiment E62

[1927] The multi-chain chimeric polypeptide of embodiment E61, wherein the second sequence of soluble human TGFβRII comprises SEQ ID NO: 184.

### Embodiment E63

[1928] The multi-chain chimeric polypeptide of embodiment E1, wherein the first chimeric polypeptide comprises a sequence that is at least 80% identical to SEQ ID NO: 189.

### Embodiment E64

[1929] The multi-chain chimeric polypeptide of embodiment E63, wherein the first chimeric polypeptide comprises a sequence that is at least 90% identical to SEQ ID NO: 189.

### Embodiment E65

[1930] The multi-chain chimeric polypeptide of embodiment E64, wherein the first chimeric polypeptide comprises a sequence that is at least 95% identical to SEQ ID NO: 189.

### Embodiment E66

[1931] The multi-chain chimeric polypeptide of embodiment E65, wherein the first chimeric polypeptide comprises SEQ ID NO: 189.

### Embodiment E67

[1932] The multi-chain chimeric polypeptide of embodiment E66, wherein the first chimeric polypeptide comprises SEQ ID NO: 191.

### Embodiment E68

[1933] The multi-chain chimeric polypeptide of any one of embodiments E1 and E63-E67, wherein the second chimeric polypeptide comprises a sequence that is at least 80% identical to SEQ ID NO: 193.

### Embodiment E69

[1934] The multi-chain chimeric polypeptide of embodiment E68, wherein the second chimeric polypeptide comprises a sequence that is at least 90% identical to SEQ ID NO: 193.

### Embodiment E70

[1935] The multi-chain chimeric polypeptide of embodiment E69, wherein the second chimeric polypeptide comprises a sequence that is at least 95% identical to SEQ ID NO: 193.

### Embodiment E71

[1936] The multi-chain chimeric polypeptide of embodiment E70, wherein the second chimeric polypeptide comprises SEQ ID NO: 193.

### Embodiment E72

[1937] The multi-chain chimeric polypeptide of embodiment E71, wherein the second chimeric polypeptide comprises SEQ ID NO: 195.

### Embodiment E73

[1938] The multi-chain chimeric polypeptide of any one of embodiments E1-E62, wherein the first chimeric polypeptide further comprises one or more additional target-binding domain(s), where at least one of the one or more additional antigen-binding domain(s) is positioned between the soluble tissue factor domain and the first domain of the pair of affinity domains.

### Embodiment E74

[1939] The multi-chain chimeric polypeptide of embodiment E73, wherein the first chimeric polypeptide further comprises a linker sequence between the soluble tissue factor domain and the at least one of the one or more additional antigen-binding domain(s), and/or a linker sequence between the at least one of the one or more additional antigen-binding domain(s) and the first domain of the pair of affinity domains.

### Embodiment E75

[1940] The multi-chain chimeric polypeptide of any one of embodiments E1-E62, wherein the first chimeric polypeptide further comprises one or more additional target-binding domains at the N-terminal and/or C-terminal end of the first chimeric polypeptide.

### Embodiment E76

[1941] The multi-chain chimeric polypeptide of embodiment E75, wherein at least one of the one or more additional target-binding domains directly abuts the first domain of the pair of affinity domains in the first chimeric polypeptide.

### Embodiment E77

[1942] The multi-chain chimeric polypeptide of embodiment E75, wherein the first chimeric polypeptide further comprises a linker sequence between the at least one of the one or more additional target-binding domains and the first domain of the pair of affinity domains.

### Embodiment E78

[1943] The multi-chain chimeric polypeptide of embodiment E75, wherein the at least one of the one or more additional target-binding domains directly abuts the first target-binding domain in the first chimeric polypeptide.

### Embodiment E79

[1944] The multi-chain chimeric polypeptide of embodiment E75, wherein the first chimeric polypeptide further comprises a linker sequence between the at least one of the one or more additional target-binding domains and the first target-binding domain.

### Embodiment E80

[1945] The multi-chain chimeric polypeptide of embodiment E75, wherein at least one of the one or more additional target-binding domains is disposed at the N- and/or C-terminus of the first chimeric polypeptide, and at least one of the one or more additional target-binding domains is positioned between the soluble tissue factor domain and the first domain of the pair of affinity domains in the first chimeric polypeptide.

### Embodiment E81

[1946] The multi-chain chimeric polypeptide of embodiment E80, wherein the at least one additional target-binding domain of the one or more additional target-binding domains disposed at the N-terminus directly abuts the first target-binding domain or the first domain of the pair of affinity domains in the first chimeric polypeptide.

### Embodiment E82

[1947] The multi-chain chimeric polypeptide of embodiment E80, wherein the first chimeric polypeptide further comprises a linker sequence disposed between the at least one additional target-binding domain and the first target-binding domain or the first domain of the pair of affinity domains in the first chimeric polypeptide.

### Embodiment E83

[1948] The multi-chain chimeric polypeptide of embodiment E80, wherein the at least one additional target-binding domain of the one or more additional target-binding domains disposed at the C-terminus directly abuts the first target-binding domain or the first domain of the pair of affinity domains in the first chimeric polypeptide.

### Embodiment E84

[1949] The multi-chain chimeric polypeptide of embodiment E80, wherein the first chimeric polypeptide further comprises a linker sequence disposed between the at least one additional target-binding domain and the first target-binding domain or the first domain of the pair of affinity domains in the first chimeric polypeptide.

### Embodiment E85

[1950] The multi-chain chimeric polypeptide of embodiment E80, wherein the at least one of the one or more additional target-binding domains positioned between the soluble tissue factor domain and the first domain of the pair of affinity domains, directly abuts the soluble tissue factor domain and/or the first domain of the pair of affinity domains.

### Embodiment E86

[1951] The multi-chain chimeric polypeptide of embodiment E80, wherein the first chimeric polypeptide further comprises a linker sequence disposed (i) between the soluble tissue factor domain and the at least one of the one or more additional target-binding domains positioned between the soluble tissue factor domain and the first domain of the pair of affinity domains, and/or (ii) between the first domain of the pair of affinity domains and the at least one of the one or more additional target-binding domains positioned between the soluble tissue factor domain and the first domain of the pair of affinity domains.

### Embodiment E87

[1952] The multi-chain chimeric polypeptide of any one of embodiments E1-E62 and E73-E86, wherein the second chimeric polypeptide further comprises one or more additional target-binding domains at the N-terminal end or the C-terminal end of the second chimeric polypeptide.

### Embodiment E88

[1953] The multi-chain chimeric polypeptide of embodiment E87, wherein at least one of the one or more additional target-binding domains directly abuts the second domain of the pair of affinity domains in the second chimeric polypeptide.

### Embodiment E89

[1954] The multi-chain chimeric polypeptide of embodiment E87, wherein the second chimeric polypeptide further comprises a linker sequence between at least one of the one or more additional target-binding domains and the second domain of the pair of affinity domains in the second chimeric polypeptide.

### Embodiment E90

[1955] The multi-chain chimeric polypeptide of embodiment E87, wherein at least one of the one or more additional target-binding domains directly abuts the second target-binding domain in the second chimeric polypeptide.

### Embodiment E91

[1956] The multi-chain chimeric polypeptide of embodiment E87, wherein the second chimeric polypeptide further comprises a linker sequence between at least one of the one or more additional target-binding domains and the second target-binding domain in the second chimeric polypeptide.

### Embodiment E92

[1957] The multi-chain chimeric polypeptide of any one of embodiments E73-E91, wherein two or more of the first target-binding domain, the second target-binding domain, and the one or more additional target-binding domains bind specifically to the same antigen.

### Embodiment E93

[1958] The multi-chain chimeric polypeptide of embodiment E92, wherein two or more of the first target-binding domain, the second target-binding domain, and the one or more additional target-binding domains bind specifically to the same epitope.

### Embodiment E94

[1959] The multi-chain chimeric polypeptide of embodiment E93, wherein two or more of the first target-binding domain, the second target-binding domain, and the one or more additional target-binding domains comprise the same amino acid sequence.

### Embodiment E95

[1960] The multi-chain chimeric polypeptide of any one of embodiments E73-E91, wherein the first target-binding domain, the second target-binding domain, and the one or more additional target-binding domains bind specifically to different antigens.

### Embodiment E96

[1961] The multi-chain chimeric polypeptide of any one of embodiments E73-E95, wherein the one or more additional antigen-binding domains bind specifically to a target selected from the group consisting of: CD16a, CD28, CD3, CD33, CD20, CD19, CD22, CD123, IL-1R, IL-1, VEGF, IL-6R, IL-4, IL-10, PDL-1, TIGIT, PD-1, TIM3, CTLA4, MICA, MICB, IL-6, IL-8, TNFα, CD26, CD36, ULBP2, CD30, CD200, IGF-1R, MUC4AC, MUC5AC, Trop-2, CMET, EGFR, HER1, HER2, HER3, PSMA, CEA, B7H3, EPCAM, BCMA, P-cadherin, CEACAM5, a UL16-binding protein, HLA-DR, DLL4, TYRO3, AXL, MER, CD122, CD155, PDGF-D, a ligand of TGF-β receptor II (TGF-βRII), a ligand of TGF-βRIII, a ligand of DNAM1, a ligand of NKp46, a ligand of NKp44, a ligand of NKG2D, a ligand of NKp30, a ligand for a scMHCI, a ligand for a scMHCII, a ligand for a scTCR, a receptor for IL-1, a receptor for IL-2, a receptor for IL-3, a receptor for IL-7, a receptor for IL-8, a receptor for IL-10, a receptor for IL-12, a receptor for IL-15, a receptor for IL-17, a receptor for IL-18, a receptor for IL-21, a receptor for PDGF-DD, a receptor for stem cell factor (SCF), a receptor for stem cell-like tyrosine kinase 3 ligand (FLT3L), a receptor for MICA, a receptor for MICB, a receptor for a ULP16-binding protein, a receptor for CD155, and a receptor for CD28.

### Embodiment E97

[1962] The multi-chain chimeric polypeptide of any one of embodiments E73-E95, wherein the one or more additional target-binding domains is a soluble interleukin or cytokine protein.

### Embodiment E98

[1963] The multi-chain chimeric polypeptide of embodiment E97, wherein the soluble interleukin, cytokine, or ligand protein is selected from the group consisting of: IL-1, IL-2, IL-3, IL-7, IL-8, IL-10, IL-12, IL-15, IL-17, IL-18, IL-21, PDGF-DD, SCF, FLT3L, MICA, MICB, and a ULP16-binding protein.

### Embodiment E99

[1964] The multi-chain chimeric polypeptide of any one of embodiments E73-E95, wherein the one or more additional target-binding domains is a soluble interleukin or cytokine receptor.

### Embodiment E100

[1965] The multi-chain chimeric polypeptide of embodiment E99, wherein the soluble receptor is a soluble TGF-β receptor II (TGF-β RII), a soluble TGF-βRIII, a soluble NKG2D, a soluble NKp30, a soluble NKp44, a soluble NKp46, a soluble DNAM1, a scMHCI, a scMHCII, a scTCR, a soluble CD155, or a soluble CD28.

### Embodiment E101

[1966] A composition comprising any of the multi-chain chimeric polypeptides of embodiments E1-E100.

### Embodiment E102

[1967] The composition of embodiment E101, wherein the composition is a pharmaceutical composition.

### Embodiment E103

[1968] A kit comprising at least one dose of the composition of embodiment E101 or E102.

### Embodiment E104

[1969] Nucleic acid encoding any of the multi-chain chimeric polypeptides of any one of embodiments E1-E100.

### Embodiment E105

[1970] A vector comprising the nucleic acid of embodiment E104.

### Embodiment E106

[1971] The vector of embodiment E105, wherein the vector is an expression vector.

### Embodiment E107

[1972] A cell comprising the nucleic acid of embodiment C104 or the vector of embodiment E105 or E106.

### Embodiment E108

[1973] A method of producing a multi-chain chimeric polypeptide, the method comprising:

[1974] culturing the cell of embodiment E107 in a culture medium under conditions sufficient to result in the production of the multi-chain chimeric polypeptide; and

[1975] recovering the multi-chain chimeric polypeptide from the cell and/or the culture medium.

### Embodiment E109

[1976] A multi-chain chimeric polypeptide produced by the method of embodiment E108.

### Embodiment E110

[1977] The multi-chain chimeric polypeptide of embodiment E12, wherein the soluble human tissue factor domain comprises a sequence that is at least 80% identical to SEQ ID NO: 97.

### Embodiment E111

[1978] The multi-chain chimeric polypeptide of embodiment E110, wherein the soluble human tissue factor domain comprises a sequence that is at least 90% identical to SEQ ID NO: 97.

### Embodiment E112

[1979] The multi-chain chimeric polypeptide of embodiment E111, wherein the soluble human tissue factor domain comprises a sequence that is at least 95% identical to SEQ ID NO: 97.

### Embodiment E113

[1980] The multi-chain chimeric polypeptide of embodiment E112, wherein the soluble human tissue factor domain comprises a sequence that is 100% identical to SEQ ID NO: 97.

### Embodiment E114

[1981] The multi-chain chimeric polypeptide of embodiment E12, wherein the soluble human tissue factor domain comprises a sequence that is at least 80% identical to SEQ ID NO: 98.

### Embodiment E115

[1982] The multi-chain chimeric polypeptide of embodiment E114, wherein the soluble human tissue factor domain comprises a sequence that is at least 90% identical to SEQ ID NO: 98.

### Embodiment E116

[1983] The multi-chain chimeric polypeptide of embodiment E115, wherein the soluble human tissue factor domain comprises a sequence that is at least 95% identical to SEQ ID NO: 98.

### Embodiment E117

[1984] The multi-chain chimeric polypeptide of embodiment E116, wherein the soluble human tissue factor domain comprises a sequence that is 100% identical to SEQ ID NO: 98.

### Embodiment F1

[1985] A multi-chain chimeric polypeptide comprising:

[1986] (c) a first chimeric polypeptide comprising:
[1987] (i) a first target-binding domain;
[1988] (ii) a soluble tissue factor domain; and
[1989] (iii) a first domain of a pair of affinity domains;

[1990] (d) a second chimeric polypeptide comprising:
[1991] (i) a second domain of a pair of affinity domains; and
[1992] (ii) a second target-binding domain,

[1993] wherein:

[1994] the first chimeric polypeptide and the second chimeric polypeptide associate through the binding of the first domain and the second domain of the pair of affinity domains;

[1995] the first target-binding domain and the second targeting-binding domain each independently bind specifically to a receptor of IL-21 or a receptor of IL-7.

### Embodiment F2

[1996] The multi-chain chimeric polypeptide of embodiment F1, wherein the first target-binding domain and the soluble tissue factor domain directly abut each other in the first chimeric polypeptide.

### Embodiment F3

[1997] The multi-chain chimeric polypeptide of embodiment F1, wherein the first chimeric polypeptide further comprises a linker sequence between the first target-binding domain and the soluble tissue factor domain in the first chimeric polypeptide.

### Embodiment F4

[1998] The multi-chain chimeric polypeptide of any one of embodiments F1-F3, wherein the soluble tissue factor domain and the first domain of the pair of affinity domains directly abut each other in the first chimeric polypeptide.

### Embodiment F5

[1999] The multi-chain chimeric polypeptide of any one of embodiments F1-F3, wherein the first chimeric polypeptide further comprises a linker sequence between the soluble tissue factor domain and the first domain of the pair of affinity domains in the first chimeric polypeptide.

### Embodiment F6

[2000] The multi-chain chimeric polypeptide of any one of embodiments F1-F5, wherein the second domain of the pair of affinity domains and the second target-binding domain directly abut each other in the second chimeric polypeptide.

### Embodiment F7

[2001] The multi-chain chimeric polypeptide of any one of embodiments F1-F5, wherein second chimeric polypeptide further comprises a linker sequence between the second domain of the pair of affinity domains and the second target-binding domain in the second chimeric polypeptide.

### Embodiment F8

[2002] The multi-chain chimeric polypeptide of any one of embodiments F1-F7, wherein the soluble tissue factor domain is a soluble human tissue factor domain.

### Embodiment F9

[2003] The multi-chain chimeric polypeptide of embodiment F8, wherein the soluble human tissue factor domain comprises a sequence that is at least 80% identical to SEQ ID NO: 93.

### Embodiment F10

[2004] The multi-chain chimeric polypeptide of embodiment F9, wherein the soluble human tissue factor domain comprises a sequence that is at least 90% identical to SEQ ID NO: 93.

### Embodiment F11

[2005] The multi-chain chimeric polypeptide of embodiment F10, wherein the soluble human tissue factor domain comprises a sequence that is at least 95% identical to SEQ ID NO: 93.

### Embodiment F12

[2006] The multi-chain chimeric polypeptide of embodiment F11, wherein the soluble human tissue factor domain comprises SEQ ID NO: 93.

### Embodiment F13

[2007] The multi-chain chimeric polypeptide of embodiment F8, wherein the soluble human tissue factor domain comprises a sequence that is at least 80% identical to SEQ ID NO: 97.

### Embodiment F14

[2008] The multi-chain chimeric polypeptide of embodiment F13, wherein the soluble human tissue factor domain comprises a sequence that is at least 90% identical to SEQ ID NO: 97.

### Embodiment F15

[2009] The multi-chain chimeric polypeptide of embodiment F14, wherein the soluble human tissue factor domain comprises a sequence that is at least 95% identical to SEQ ID NO: 97.

### Embodiment F16

[2010] The multi-chain chimeric polypeptide of embodiment F15, wherein the soluble human tissue factor domain comprises SEQ ID NO: 97.

### Embodiment F17

[2011] The multi-chain chimeric polypeptide of embodiment F8, wherein the soluble human tissue factor domain comprises a sequence that is at least 80% identical to SEQ ID NO: 98.

### Embodiment F18

[2012] The multi-chain chimeric polypeptide of embodiment F17, wherein the soluble human tissue factor domain comprises a sequence that is at least 90% identical to SEQ ID NO: 98.

### Embodiment F19

[2013] The multi-chain chimeric polypeptide of embodiment F18, wherein the soluble human tissue factor domain comprises a sequence that is at least 95% identical to SEQ ID NO: 98.

### Embodiment F20

[2014] The multi-chain chimeric polypeptide of embodiment F19, wherein the soluble human tissue factor domain comprises SEQ ID NO: 98.

### Embodiment F21

[2015] The multi-chain chimeric polypeptide of any one of embodiments F8-F11, F13-F15, and F17-F19, wherein the soluble human tissue factor domain does not comprise one or more of:

[2016] a lysine at an amino acid position that corresponds to amino acid position 20 of mature wildtype human tissue factor protein;

[2017] an isoleucine at an amino acid position that corresponds to amino acid position 22 of mature wildtype human tissue factor protein;

[2018] a tryptophan at an amino acid position that corresponds to amino acid position 45 of mature wildtype human tissue factor protein;

[2019] an aspartic acid at an amino acid position that corresponds to amino acid position 58 of mature wildtype human tissue factor protein;

[2020] a tyrosine at an amino acid position that corresponds to amino acid position 94 of mature wildtype human tissue factor protein;

[2021] an arginine at an amino acid position that corresponds to amino acid position 135 of mature wildtype human tissue factor protein; and

[2022] a phenylalanine at an amino acid position that corresponds to amino acid position 140 of mature wildtype human tissue factor protein.

### Embodiment F22

[2023] The multi-chain chimeric polypeptide of embodiment F21, wherein the soluble human tissue factor domain does not comprise any of:

[2024] a lysine at an amino acid position that corresponds to amino acid position 20 of mature wildtype human tissue factor protein;

[2025] an isoleucine at an amino acid position that corresponds to amino acid position 22 of mature wildtype human tissue factor protein;

[2026] a tryptophan at an amino acid position that corresponds to amino acid position 45 of mature wildtype human tissue factor protein;

[2027] an aspartic acid at an amino acid position that corresponds to amino acid position 58 of mature wildtype human tissue factor protein;

[2028] a tyrosine at an amino acid position that corresponds to amino acid position 94 of mature wildtype human tissue factor protein;

[2029] an arginine at an amino acid position that corresponds to amino acid position 135 of mature wildtype human tissue factor protein; and

[2030] a phenylalanine at an amino acid position that corresponds to amino acid position 140 of mature wildtype human tissue factor protein.

### Embodiment F23

[2031] The multi-chain chimeric polypeptide of any one of embodiments F1-F22, wherein the soluble tissue factor domain is not capable of binding to Factor VIIa.

### Embodiment F24

[2032] The multi-chain chimeric polypeptide of any one of embodiments F1-F23, wherein the soluble tissue factor domain does not convert inactive Factor X into Factor Xa.

### Embodiment F25

[2033] The multi-chain chimeric polypeptide of any one of embodiments F1-F24, wherein the multi-chain chimeric polypeptide does not stimulate blood coagulation in a mammal.

### Embodiment F26

[2034] The multi-chain chimeric polypeptide of any one of embodiments F1-F25, wherein the first chimeric polypeptide further comprises a peptide tag at the N-terminal end or the C-terminal end of the first chimeric polypeptide.

### Embodiment F27

[2035] The multi-chain chimeric polypeptide of any one of embodiments F1-F26, wherein the second chimeric polypeptide further comprises a peptide tag at the N-terminal end or the C-terminal end of the second chimeric polypeptide.

### Embodiment F28

[2036] The multi-chain chimeric polypeptide of any one of embodiments F1-F27, wherein the first chimeric polypeptide and/or the second chimeric polypeptide further comprises a signal sequence at its N-terminal end.

### Embodiment F29

[2037] The multi-chain chimeric polypeptide of embodiment F28, wherein the signal sequence comprises SEQ ID NO: 117.

### Embodiment F30

[2038] The multi-chain chimeric polypeptide of embodiment F28, wherein the signal sequence is SEQ ID NO: 328.

### Embodiment F31

[2039] The multi-chain chimeric polypeptide of any one of embodiments F1-F30, wherein the pair of affinity domains is a sushi domain from an alpha chain of human IL-15 receptor (IL-15Rα) and a soluble IL-15.

### Embodiment F32

[2040] The multi-chain chimeric polypeptide of embodiment F31, wherein the soluble IL-15 has a D8N or D8A amino acid substitution.

### Embodiment F33

[2041] The multi-chain chimeric polypeptide of embodiment F31, wherein the soluble IL-15 comprises a sequence that is at least 80% identical to SEQ ID NO: 82.

### Embodiment F34

[2042] The multi-chain chimeric polypeptide of embodiment F33, wherein the soluble IL-15 comprises a sequence that is at least 90% identical to SEQ ID NO: 82.

### Embodiment F35

[2043] The multi-chain chimeric polypeptide of embodiment F34, wherein the soluble IL-15 comprises a sequence that is at least 95% identical to SEQ ID NO: 82.

### Embodiment F36

[2044] The multi-chain chimeric polypeptide of embodiment F35, wherein the soluble IL-15 comprises SEQ ID NO: 82.

### Embodiment F37

[2045] The multi-chain chimeric polypeptide of any one of embodiments F31-F36, wherein the sushi domain of IL-15Rα comprises a sushi domain from human IL-15Rα.

### Embodiment F38

[2046] The multi-chain chimeric polypeptide of embodiment F37, wherein the sushi domain from human IL-15Rα comprises a sequence that is at least 80% identical to SEQ ID NO: 113.

### Embodiment F39

[2047] The multi-chain chimeric polypeptide of embodiment F38, wherein the sushi domain from human IL-15Rα comprises a sequence that is at least 90% identical to SEQ ID NO: 113.

### Embodiment F40

[2048] The multi-chain chimeric polypeptide of embodiment F39, wherein the sushi domain from human IL-15Rα comprises a sequence that is at least 95% identical to SEQ ID NO: 113.

### Embodiment F41

[2049] The multi-chain chimeric polypeptide of embodiment F40, wherein the sushi domain from human IL-15Rα comprises SEQ ID NO: 113.

### Embodiment F42

[2050] The multi-chain chimeric polypeptide of embodiment F37, wherein the sushi domain from human IL-15Rα is a mature full-length IL-15Rα.

### Embodiment F43

[2051] The multi-chain chimeric polypeptide of any one of embodiments F1-F30, wherein the pair of affinity domains is selected from the group consisting of: barnase and barnstar, a PKA and an AKAP, adapter/docking tag modules based on mutated RNase I fragments, and SNARE modules based on interactions of the proteins syntaxin, synaptotagmin, synaptobrevin, and SNAP25.

### Embodiment F44

[2052] The multi-chain chimeric polypeptide of any one of embodiments F1-F43, wherein one or both of the first target-binding domain and the second target-binding domain is an agonistic antigen-binding domain.

### Embodiment F45

[2053] The multi-chain chimeric polypeptide of embodiment F44, wherein the first target-binding domain and the second target-binding domain are each agonistic antigen-binding domains.

### Embodiment F46

[2054] The multi-chain chimeric polypeptide of embodiment F44 or F45, wherein antigen-binding domain comprises a scFv or single-domain antibody.

### Embodiment F47

[2055] The multi-chain chimeric polypeptide of any one of embodiments F1-F43, wherein one or both of the first target-binding domain and the second target-binding domain is a soluble IL-21 or a soluble IL-7.

### Embodiment F48

[2056] The multi-chain chimeric polypeptide of embodiment F47, wherein the first target-binding domain and the second target-binding domain are each independently a soluble IL-21 or a soluble IL-7.

### Embodiment F49

[2057] The multi-chain chimeric polypeptide of any one of embodiments F1-F48, wherein the first target-binding domain and the second target-binding domain both bind specifically to a receptor of IL-21 or a receptor of IL-7.

### Embodiment F50

[2058] The multi-chain chimeric polypeptide of embodiment F49, wherein the first target-binding domain and the second target-binding domain bind specifically to the same epitope.

### Embodiment F51

[2059] The multi-chain chimeric polypeptide of embodiment F50, wherein the first target-binding domain and the second target-binding domain comprise the same amino acid sequence.

### Embodiment F52

[2060] The multi-chain chimeric polypeptide of any one of embodiments F1-F48, wherein the first target-binding domain binds specifically to a receptor for IL-21, and the second target-binding domain binds specifically to a receptor for IL-7.

### Embodiment F53

[2061] The multi-chain chimeric polypeptide of any one of embodiments F1-F48, wherein the first target-binding domain binds specifically to a receptor for IL-7, and the second target-binding domain bind specifically to a receptor for IL-21.

### Embodiment F54

[2062] The multi-chain chimeric polypeptide of embodiment F53, wherein the first target-binding domain comprises a soluble IL-21.

### Embodiment F55

[2063] The multi-chain chimeric polypeptide of embodiment F54, wherein the soluble IL-21 is a soluble human IL-21.

### Embodiment F56

[2064] The multi-chain chimeric polypeptide of embodiment F55, wherein the soluble human IL-21 comprises a sequence at least 80% identical to SEQ ID NO: 83.

### Embodiment F57

[2065] The multi-chain chimeric polypeptide of embodiment F56, wherein the soluble human IL-21 comprises a sequence at least 90% identical to SEQ ID NO: 83.

### Embodiment F58

[2066] The multi-chain chimeric polypeptide of embodiment F57, wherein the soluble human IL-21 comprises a sequence at least 95% identical to SEQ ID NO: 83.

### Embodiment F59

[2067] The multi-chain chimeric polypeptide of embodiment F58, wherein the soluble human IL-21 comprises a sequence of SEQ ID NO: 83.

### Embodiment F60

[2068] The multi-chain chimeric polypeptide of any one of embodiments F53-F59, wherein the second target-binding domain comprises a soluble IL-7.

### Embodiment F61

[2069] The multi-chain chimeric polypeptide of embodiment F60, wherein the soluble IL-7 is a soluble human IL-7.

### Embodiment F62

[2070] The multi-chain chimeric polypeptide of embodiment F61, wherein the soluble human IL-7 comprises a sequence at least 80% identical to SEQ ID NO: 79.

### Embodiment F63

[2071] The multi-chain chimeric polypeptide of embodiment F62, wherein the soluble human IL-7 comprises a sequence at least 90% identical to SEQ ID NO: 79.

### Embodiment F64

[2072] The multi-chain chimeric polypeptide of embodiment F63, wherein the soluble human IL-7 comprises a sequence at least 95% identical to SEQ ID NO: 79.

### Embodiment F65

[2073] The multi-chain chimeric polypeptide of embodiment F64, wherein the soluble human IL-7 comprises a sequence of SEQ ID NO: 79.

### Embodiment F66

[2074] The multi-chain chimeric polypeptide of embodiment F1, wherein the first chimeric polypeptide comprises a sequence that is at least 80% identical to SEQ ID NO: 207.

### Embodiment F67

[2075] The multi-chain chimeric polypeptide of embodiment F66, wherein the first chimeric polypeptide comprises a sequence that is at least 90% identical to SEQ ID NO: 207.

### Embodiment F68

[2076] The multi-chain chimeric polypeptide of embodiment F67, wherein the first chimeric polypeptide comprises a sequence that is at least 95% identical to SEQ ID NO: 207.

### Embodiment F69

[2077] The multi-chain chimeric polypeptide of embodiment F68, wherein the first chimeric polypeptide comprises SEQ ID NO: 207.

### Embodiment F70

[2078] The multi-chain chimeric polypeptide of embodiment F69, wherein the first chimeric polypeptide comprises SEQ ID NO: 209.

### Embodiment F71

[2079] The multi-chain chimeric polypeptide of any one of embodiments F1 and F66-F70, wherein the second chimeric polypeptide comprises a sequence that is at least 80% identical to SEQ ID NO: 211.

### Embodiment F72

[2080] The multi-chain chimeric polypeptide of embodiment F71, wherein the second chimeric polypeptide comprises a sequence that is at least 90% identical to SEQ ID NO: 211.

### Embodiment F73

[2081] The multi-chain chimeric polypeptide of embodiment F72, wherein the second chimeric polypeptide comprises a sequence that is at least 95% identical to SEQ ID NO: 211.

### Embodiment F74

[2082] The multi-chain chimeric polypeptide of embodiment F73, wherein the second chimeric polypeptide comprises SEQ ID NO: 211.

### Embodiment F75

[2083] The multi-chain chimeric polypeptide of embodiment F74, wherein the second chimeric polypeptide comprises SEQ ID NO: 213.

### Embodiment F76

[2084] The multi-chain chimeric polypeptide of embodiment F1, wherein the first chimeric polypeptide comprises a sequence that is at least 80% identical to SEQ ID NO: 199.

### Embodiment F77

[2085] The multi-chain chimeric polypeptide of embodiment F76, wherein the first chimeric polypeptide comprises a sequence that is at least 90% identical to SEQ ID NO: 199.

### Embodiment F78

[2086] The multi-chain chimeric polypeptide of embodiment F77, wherein the first chimeric polypeptide comprises a sequence that is at least 95% identical to SEQ ID NO: 199.

### Embodiment F79

[2087] The multi-chain chimeric polypeptide of embodiment F68, wherein the first chimeric polypeptide comprises SEQ ID NO: 199.

### Embodiment F80

[2088] The multi-chain chimeric polypeptide of embodiment F69, wherein the first chimeric polypeptide comprises SEQ ID NO: 201.

### Embodiment F81

[2089] The multi-chain chimeric polypeptide of any one of embodiments F1 and F76-F80, wherein the second chimeric polypeptide comprises a sequence that is at least 80% identical to SEQ ID NO: 203.

### Embodiment F82

[2090] The multi-chain chimeric polypeptide of embodiment F81, wherein the second chimeric polypeptide comprises a sequence that is at least 90% identical to SEQ ID NO: 203.

### Embodiment F83

[2091] The multi-chain chimeric polypeptide of embodiment F82, wherein the second chimeric polypeptide comprises a sequence that is at least 95% identical to SEQ ID NO: 203.

### Embodiment F84

[2092] The multi-chain chimeric polypeptide of embodiment F83, wherein the second chimeric polypeptide comprises SEQ ID NO: 203.

### Embodiment F85

[2093] The multi-chain chimeric polypeptide of embodiment F84, wherein the second chimeric polypeptide comprises SEQ ID NO: 209.

### Embodiment F86

[2094] The multi-chain chimeric polypeptide of any one of embodiments F1-F65, wherein the first chimeric polypeptide further comprises one or more additional target-binding domain(s), where at least one of the one or more additional antigen-binding domain(s) is positioned between the soluble tissue factor domain and the first domain of the pair of affinity domains.

### Embodiment F87

[2095] The multi-chain chimeric polypeptide of embodiment F86, wherein the first chimeric polypeptide further comprises a linker sequence between the soluble tissue factor domain and the at least one of the one or more additional antigen-binding domain(s), and/or a linker sequence between the at least one of the one or more additional antigen-binding domain(s) and the first domain of the pair of affinity domains.

### Embodiment F88

[2096] The multi-chain chimeric polypeptide of any one of embodiments F1-F65, wherein the first chimeric polypeptide further comprises one or more additional target-binding domains at the N-terminal and/or C-terminal end of the first chimeric polypeptide.

### Embodiment F89

[2097] The multi-chain chimeric polypeptide of embodiment F88, wherein at least one of the one or more additional target-binding domains directly abuts the first domain of the pair of affinity domains in the first chimeric polypeptide.

### Embodiment F90

[2098] The multi-chain chimeric polypeptide of embodiment F88, wherein the first chimeric polypeptide further comprises a linker sequence between the at least one of the one or more additional target-binding domains and the first domain of the pair of affinity domains.

### Embodiment F91

[2099] The multi-chain chimeric polypeptide of embodiment F88, wherein the at least one of the one or more additional target-binding domains directly abuts the first target-binding domain in the first chimeric polypeptide.

### Embodiment F92

[2100] The multi-chain chimeric polypeptide of embodiment F88, wherein the first chimeric polypeptide further comprises a linker sequence between the at least one of the one or more additional target-binding domains and the first target-binding domain.

### Embodiment F93

[2101] The multi-chain chimeric polypeptide of embodiment F88, wherein at least one of the one or more additional target-binding domains is disposed at the N- and/or C-terminus of the first chimeric polypeptide, and at least one of the one or more additional target-binding domains is positioned between the soluble tissue factor domain and the first domain of the pair of affinity domains in the first chimeric polypeptide.

### Embodiment F94

[2102] The multi-chain chimeric polypeptide of embodiment F93, wherein the at least one additional target-binding domain of the one or more additional target-binding domains disposed at the N-terminus directly abuts the first target-binding domain or the first domain of the pair of affinity domains in the first chimeric polypeptide.

### Embodiment F95

[2103] The multi-chain chimeric polypeptide of embodiment F93, wherein the first chimeric polypeptide further comprises a linker sequence disposed between the at least one additional target-binding domain and the first target-binding domain or the first domain of the pair of affinity domains in the first chimeric polypeptide.

### Embodiment F96

[2104] The multi-chain chimeric polypeptide of embodiment F93, wherein the at least one additional target-binding domain of the one or more additional target-binding domains disposed at the C-terminus directly abuts the first target-binding domain or the first domain of the pair of affinity domains in the first chimeric polypeptide.

### Embodiment F97

[2105] The multi-chain chimeric polypeptide of embodiment F93, wherein the first chimeric polypeptide further comprises a linker sequence disposed between the at least one additional target-binding domain and the first target-binding domain or the first domain of the pair of affinity domains in the first chimeric polypeptide.

### Embodiment F98

[2106] The multi-chain chimeric polypeptide of embodiment F93, wherein the at least one of the one or more additional target-binding domains positioned between the soluble tissue factor domain and the first domain of the pair of affinity domains, directly abuts the soluble tissue factor domain and/or the first domain of the pair of affinity domains.

### Embodiment F99

[2107] The multi-chain chimeric polypeptide of embodiment F93, wherein the first chimeric polypeptide further comprises a linker sequence disposed (i) between the soluble tissue factor domain and the at least one of the one or more additional target-binding domains positioned between the soluble tissue factor domain and the first domain of the pair of affinity domains, and/or (ii) between the first domain of the pair of affinity domains and the at least one of the one or more additional target-binding domains positioned between the soluble tissue factor domain and the first domain of the pair of affinity domains.

### Embodiment F100

[2108] The multi-chain chimeric polypeptide of any one of embodiments F1-F65 and F86-F99, wherein the second chimeric polypeptide further comprises one or more additional target-binding domains at the N-terminal end or the C-terminal end of the second chimeric polypeptide.

### Embodiment F101

[2109] The multi-chain chimeric polypeptide of embodiment F100, wherein at least one of the one or more additional target-binding domains directly abuts the second domain of the pair of affinity domains in the second chimeric polypeptide.

### Embodiment F102

[2110] The multi-chain chimeric polypeptide of embodiment F100, wherein the second chimeric polypeptide further comprises a linker sequence between at least one of the one or more additional target-binding domains and the second domain of the pair of affinity domains in the second chimeric polypeptide.

### Embodiment F103

[2111] The multi-chain chimeric polypeptide of embodiment F100, wherein at least one of the one or more additional target-binding domains directly abuts the second target-binding domain in the second chimeric polypeptide.

### Embodiment F104

[2112] The multi-chain chimeric polypeptide of embodiment F100, wherein the second chimeric polypeptide further comprises a linker sequence between at least one of the one or more additional target-binding domains and the second target-binding domain in the second chimeric polypeptide.

### Embodiment F105

[2113] The multi-chain chimeric polypeptide of any one of embodiments F86-F104, wherein two or more of the first target-binding domain, the second target-binding domain, and the one or more additional target-binding domains bind specifically to the same antigen.

### Embodiment F106

[2114] The multi-chain chimeric polypeptide of embodiment F105, wherein two or more of the first target-binding domain, the second target-binding domain, and the one or more additional target-binding domains bind specifically to the same epitope.

### Embodiment F107

[2115] The multi-chain chimeric polypeptide of embodiment F106, wherein two or more of the first target-binding domain, the second target-binding domain, and the one or more additional target-binding domains comprise the same amino acid sequence.

### Embodiment F108

[2116] The multi-chain chimeric polypeptide of any one of embodiments F86-F104, wherein the first target-binding domain, the second target-binding domain, and the one or more additional target-binding domains bind specifically to different antigens.

### Embodiment F109

[2117] The multi-chain chimeric polypeptide of any one of embodiments F86-F108, wherein the one or more additional antigen-binding domains bind specifically to a target selected from the group consisting of: CD16a, CD28, CD3, CD33, CD20, CD19, CD22, CD123, IL-1R, IL-1, VEGF, IL-6R, IL-4, IL-10, PDL-1, TIGIT, PD-1, TIM3, CTLA4, MICA, MICB, IL-6, IL-8, TNFα, CD26, CD36, ULBP2, CD30, CD200, IGF-1R, MUC4AC, MUC5AC, Trop-2, CMET, EGFR, HER1, HER2, HER3, PSMA, CEA, B7H3, EPCAM, BCMA, P-cadherin, CEACAM5, a UL16-binding protein, HLA-DR, DLL4, TYRO3, AXL, MER, CD122, CD155, PDGF-DD, a ligand of TGF-β receptor II (TGF-βRII), a ligand of TGF-βRIII, a ligand of DNAM1, a ligand of NKp46, a ligand of NKp44, a ligand of NKG2D, a ligand of NKp30, a ligand for a scMHCI, a ligand for a scMHCII, a ligand for a scTCR, a receptor for IL-1, a receptor for IL-2, a receptor for IL-3, a receptor for IL-7, a receptor for IL-8, a receptor for IL-10, a receptor for IL-12, a receptor for IL-15, a receptor for IL-17, a receptor for IL-18, a receptor for IL-21, a receptor for PDGF-DD, a receptor for stem cell factor (SCF), a receptor for stem cell-like tyrosine kinase 3 ligand (FLT3L), a receptor for MICA, a receptor for MICB, a receptor for a ULP16-binding protein, a receptor for CD155, and a receptor for CD28.

### Embodiment F110

[2118] The multi-chain chimeric polypeptide of any one of embodiments F86-F108, wherein the one or more additional target-binding domains is a soluble interleukin or cytokine protein.

### Embodiment F111

[2119] The multi-chain chimeric polypeptide of embodiment F110, wherein the soluble interleukin, cytokine, or ligand protein is selected from the group consisting of: IL-1, IL-2, IL-3, IL-7, IL-8, IL-10, IL-12, IL-15, IL-17, IL-18, IL-21, PDGF-DD, SCF, FLT3L, MICA, MICB, and a ULP16-binding protein.

### Embodiment F112

[2120] The multi-chain chimeric polypeptide of any one of embodiments F86-F108, wherein the one or more additional target-binding domains is a soluble interleukin or cytokine receptor.

### Embodiment F113

[2121] The multi-chain chimeric polypeptide of embodiment F112, wherein the soluble receptor is a soluble TGF-β receptor II (TGF-βRII), a soluble TGF-βRIII, a soluble NKG2D, a soluble NKp30, a soluble NKp44, a soluble NKp46, a soluble DNAM1, a scMHCI, a scMHCII, a scTCR, a soluble CD155, a soluble CD122, or a soluble CD28.

### Embodiment F114

[2122] A composition comprising any of the multi-chain chimeric polypeptides of embodiments F1-F113.

### Embodiment F115

[2123] The composition of embodiment F114, wherein the composition is a pharmaceutical composition.

### Embodiment F116

[2124] A kit comprising at least one dose of the composition of embodiment F114 or F115.

### Embodiment F117

[2125] Nucleic acid encoding any of the multi-chain chimeric polypeptides of any one of embodiments F1-F113.

### Embodiment F118

[2126] A vector comprising the nucleic acid of embodiment F117.

### Embodiment F119

[2127] The vector of embodiment F118, wherein the vector is an expression vector.

### Embodiment F120

[2128] A cell comprising the nucleic acid of embodiment F117 or the vector of embodiment F118 or F119.

### Embodiment F121

[2129] A method of producing a multi-chain chimeric polypeptide, the method comprising:

[2130] culturing the cell of embodiment F120 in a culture medium under conditions sufficient to result in the production of the multi-chain chimeric polypeptide; and

[2131] recovering the multi-chain chimeric polypeptide from the cell and/or the culture medium.

### Embodiment F122

[2132] A multi-chain chimeric polypeptide produced by the method of embodiment F121.

### Embodiment G1

[2133] A multi-chain chimeric polypeptide comprising:

[2134] (e) a first chimeric polypeptide comprising:
[2135] (i) a first target-binding domain;
[2136] (ii) a soluble tissue factor domain; and
[2137] (iii) a first domain of a pair of affinity domains;

[2138] (f) a second chimeric polypeptide comprising:
[2139] (i) a second domain of a pair of affinity domains; and
[2140] (ii) a second target-binding domain,

[2141] wherein:

[2142] the first chimeric polypeptide and the second chimeric polypeptide associate through the binding of the first domain and the second domain of the pair of affinity domains; and

[2143] the first target-binding domain and the second targeting-binding domain each independently bind specifically to: a receptor for IL-7, CD16, a receptor for IL-21, TGF-β, or a receptor for CD137L.

### Embodiment G2

[2144] The multi-chain chimeric polypeptide of embodiment G1, wherein the first target-binding domain and the soluble tissue factor domain directly abut each other in the first chimeric polypeptide.

### Embodiment G3

[2145] The multi-chain chimeric polypeptide of embodiment G1, wherein the first chimeric polypeptide further comprises a linker sequence between the first target-binding domain and the soluble tissue factor domain in the first chimeric polypeptide.

### Embodiment G4

[2146] The multi-chain chimeric polypeptide of any one of embodiments G1-G3, wherein the soluble tissue factor domain and the first domain of the pair of affinity domains directly abut each other in the first chimeric polypeptide.

### Embodiment G5

[2147] The multi-chain chimeric polypeptide of any one of embodiments G1-G3, wherein the first chimeric polypeptide further comprises a linker sequence between the soluble tissue factor domain and the first domain of the pair of affinity domains in the first chimeric polypeptide.

### Embodiment G6

[2148] The multi-chain chimeric polypeptide of any one of embodiments G1-G5, wherein the second domain of the pair of affinity domains and the second target-binding domain directly abut each other in the second chimeric polypeptide.

### Embodiment G7

[2149] The multi-chain chimeric polypeptide of any one of embodiments G1-G5, wherein second chimeric polypeptide further comprises a linker sequence between the second domain of the pair of affinity domains and the second target-binding domain in the second chimeric polypeptide.

### Embodiment G8

[2150] The multi-chain chimeric polypeptide of any one of embodiments G1-G7, wherein the soluble tissue factor domain is a soluble human tissue factor domain.

### Embodiment G9

[2151] The multi-chain chimeric polypeptide of embodiment G8, wherein the soluble human tissue factor domain comprises a sequence that is at least 80% identical to SEQ ID NO: 93.

### Embodiment G10

[2152] The multi-chain chimeric polypeptide of embodiment G9, wherein the soluble human tissue factor domain comprises a sequence that is at least 90% identical to SEQ ID NO: 93.

### Embodiment G11

[2153] The multi-chain chimeric polypeptide of embodiment G10, wherein the soluble human tissue factor domain comprises a sequence that is at least 95% identical to SEQ ID NO: 93.

### Embodiment G12

[2154] The multi-chain chimeric polypeptide of any one of embodiments G8-G11, wherein the soluble human tissue factor domain does not comprise one or more of:

[2155] a lysine at an amino acid position that corresponds to amino acid position 20 of mature wildtype human tissue factor protein;

[2156] an isoleucine at an amino acid position that corresponds to amino acid position 22 of mature wildtype human tissue factor protein;

[2157] a tryptophan at an amino acid position that corresponds to amino acid position 45 of mature wildtype human tissue factor protein;

[2158] an aspartic acid at an amino acid position that corresponds to amino acid position 58 of mature wildtype human tissue factor protein;

[2159] a tyrosine at an amino acid position that corresponds to amino acid position 94 of mature wildtype human tissue factor protein;

[2160] an arginine at an amino acid position that corresponds to amino acid position 135 of mature wildtype human tissue factor protein; and

[2161] a phenylalanine at an amino acid position that corresponds to amino acid position 140 of mature wildtype human tissue factor protein.

### Embodiment G13

[2162] The multi-chain chimeric polypeptide of embodiment G12, wherein the soluble human tissue factor domain does not comprise any of:

[2163] a lysine at an amino acid position that corresponds to amino acid position 20 of mature wildtype human tissue factor protein;

[2164] an isoleucine at an amino acid position that corresponds to amino acid position 22 of mature wildtype human tissue factor protein;

[2165] a tryptophan at an amino acid position that corresponds to amino acid position 45 of mature wildtype human tissue factor protein;

[2166] an aspartic acid at an amino acid position that corresponds to amino acid position 58 of mature wildtype human tissue factor protein;

[2167] a tyrosine at an amino acid position that corresponds to amino acid position 94 of mature wildtype human tissue factor protein;

[2168] an arginine at an amino acid position that corresponds to amino acid position 135 of mature wildtype human tissue factor protein; and

[2169] a phenylalanine at an amino acid position that corresponds to amino acid position 140 of mature wildtype human tissue factor protein.

### Embodiment G14

[2170] The multi-chain chimeric polypeptide of any one of embodiments G1-G13, wherein the soluble tissue factor domain is not capable of binding to Factor VIIa.

### Embodiment G15

[2171] The multi-chain chimeric polypeptide of any one of embodiments G1-G14, wherein the soluble tissue factor domain does not convert inactive Factor X into Factor Xa.

### Embodiment G16

[2172] The multi-chain chimeric polypeptide of any one of embodiments G1-G15, wherein the multi-chain chimeric polypeptide does not stimulate blood coagulation in a mammal.

### Embodiment G17

[2173] The multi-chain chimeric polypeptide of any one of embodiments G1-G16, wherein the first chimeric polypeptide further comprises a peptide tag at the N-terminal end or the C-terminal end of the first chimeric polypeptide.

### Embodiment G18

[2174] The multi-chain chimeric polypeptide of any one of embodiments G1-G17, wherein the second chimeric polypeptide further comprises a peptide tag at the N-terminal end or the C-terminal end of the second chimeric polypeptide.

### Embodiment G19

[2175] The multi-chain chimeric polypeptide of any one of embodiments G1-G18, wherein the first chimeric polypeptide and/or the second chimeric polypeptide further comprises a signal sequence at its N-terminal end.

### Embodiment G20

[2176] The multi-chain chimeric polypeptide of embodiment G19, wherein the signal sequence comprises SEQ ID NO: 117.

### Embodiment G21

[2177] The multi-chain chimeric polypeptide of embodiment G20, wherein the signal sequence is SEQ ID NO: 117.

### Embodiment G22

[2178] The multi-chain chimeric polypeptide of any one of embodiments G1-G21, wherein the pair of affinity domains is a sushi domain from an alpha chain of human IL-15 receptor (IL-15Rα) and a soluble IL-15.

### Embodiment G23

[2179] The multi-chain chimeric polypeptide of embodiment G22, wherein the soluble IL-15 has a D8N or D8A amino acid substitution.

### Embodiment G24

[2180] The multi-chain chimeric polypeptide of embodiment G22, wherein the soluble IL-15 comprises a sequence that is 80% identical to SEQ ID NO: 82.

### Embodiment G25

[2181] The multi-chain chimeric polypeptide of embodiment G24, wherein the soluble IL-15 comprises a sequence that is 90% identical to SEQ ID NO: 82.

### Embodiment G26

[2182] The multi-chain chimeric polypeptide of embodiment G25, wherein the soluble IL-15 comprises a sequence that is 95% identical to SEQ ID NO: 82.

### Embodiment G27

[2183] The multi-chain chimeric polypeptide of embodiment G26, wherein the soluble IL-15 comprises SEQ ID NO: 82.

### Embodiment G28

[2184] The multi-chain chimeric polypeptide of any one of embodiments G22-G27, wherein the sushi domain of IL-15Rα comprises a sushi domain from human IL-15Rα.

### Embodiment G29

[2185] The multi-chain chimeric polypeptide of embodiment G28, wherein the sushi domain from human IL-15Rα comprises a sequence that is 80% identical to SEQ ID NO: 113.

### Embodiment G30

[2186] The multi-chain chimeric polypeptide of embodiment G29, wherein the sushi domain from human IL-15Rα comprises a sequence that is 90% identical to SEQ ID NO: 113.

### Embodiment G31

[2187] The multi-chain chimeric polypeptide of embodiment G30, wherein the sushi domain from human IL-15Rα comprises a sequence that is 95% identical to SEQ ID NO: 113.

### Embodiment G32

[2188] The multi-chain chimeric polypeptide of embodiment G31, wherein the sushi domain from human IL-15Rα comprises SEQ ID NO: 113.

### Embodiment G33

[2189] The multi-chain chimeric polypeptide of embodiment G28, wherein the sushi domain from human IL-15Rα is a mature full-length IL-15Rα.

### Embodiment G34

[2190] The multi-chain chimeric polypeptide of any one of embodiments G1-G21, wherein the pair of affinity domains is selected from the group consisting of: barnase and barnstar, a PKA and an AKAP, adapter/docking tag modules based on mutated RNase I fragments, and SNARE modules based on interactions of the proteins syntaxin, synaptotagmin, synaptobrevin, and SNAP25.

### Embodiment G35

[2191] The multi-chain chimeric polypeptide of any one of embodiments G1-G34, wherein the first target-binding domain and the second targeting-binding domain each independently bind specifically to a receptor for IL-7, CD16, or a receptor for IL-21.

### Embodiment G36

[2192] The multi-chain chimeric polypeptide of embodiment G35, wherein the first target-binding domain binds specifically to a receptor IL-7 and the second target-binding domain binds specifically to CD16 or a receptor for IL-21.

### Embodiment G37

[2193] The multi-chain chimeric polypeptide of embodiment G36, wherein the first target-binding domain comprises a soluble IL-7 protein.

### Embodiment G38

[2194] The multi-chain chimeric polypeptide of embodiment G37, wherein the soluble IL-7 protein is a soluble human IL-7.

### Embodiment G39

[2195] The multi-chain chimeric polypeptide of any one of embodiments G36-G38, wherein the second antigen-binding domain comprises an antigen-binding domain that binds specifically to CD16.

### Embodiment G40

[2196] The multi-chain chimeric polypeptide of embodiment G39, wherein the second antigen-binding domain comprises an scFv that binds specifically to CD16.

### Embodiment G41

[2197] The multi-chain chimeric polypeptide of any one of embodiments G36-G38, wherein the second antigen-binding domain bind specifically to a receptor for IL-21.

### Embodiment G42

[2198] The multi-chain chimeric polypeptide of embodiment G41, wherein the second antigen-binding domain comprises a soluble IL-21.

### Embodiment G43

[2199] The multi-chain chimeric polypeptide of embodiment G42, wherein the soluble IL-21 is a soluble human IL-21.

### Embodiment G44

[2200] The multi-chain chimeric polypeptide of any one of embodiments G36-G40, wherein the second chimeric polypeptide further comprises an additional target-binding domain that binds specifically to a receptor for IL-21.

### Embodiment G45

[2201] The multi-chain chimeric polypeptide of embodiment G44, wherein the additional target-binding domain comprises a soluble IL-21.

### Embodiment G46

[2202] The multi-chain chimeric polypeptide of embodiment G45, wherein the soluble IL-21 is a soluble human IL-12.

### Embodiment G47

[2203] The multi-chain chimeric polypeptide of any one of embodiments G1-G34, wherein the first target-binding domain and the second targeting-binding domain each independently bind specifically to TGF-β, CD16, or a receptor for IL-21.

### Embodiment G48

[2204] The multi-chain chimeric polypeptide of embodiment G47, wherein the first target-binding domain binds specifically to a TGF-β and the second target-binding domain binds specifically to CD16 or a receptor of IL-21.

### Embodiment G49

[2205] The multi-specific chimeric polypeptide of embodiment G48, wherein the first target-binding domain is a soluble TGF-β receptor.

### Embodiment G50

[2206] The multi-specific chimeric polypeptide of embodiment G49, wherein soluble TGF-β receptor is a soluble TGFβRII receptor.

### Embodiment G51

[2207] The multi-specific chimeric polypeptide of any one of embodiments G48-G50, wherein the second target-binding domain binds specifically to CD16.

### Embodiment G52

[2208] The multi-specific chimeric polypeptide of embodiment G51, wherein the second antigen-binding domain comprises an antigen-binding domain that binds specifically to CD16.

### Embodiment G53

[2209] The multi-chain chimeric polypeptide of embodiment G52, wherein the second antigen-binding domain comprises an scFv that binds specifically to CD16.

### Embodiment G54

[2210] The multi-chain chimeric polypeptide of any one of embodiments G48-G50, wherein the second target-binding domain binds specifically to a receptor for IL-21.

### Embodiment G55

[2211] The multi-chain chimeric polypeptide of embodiment G54, wherein the second target-binding domain comprises a soluble IL-21.

### Embodiment G56

[2212] The multi-chain chimeric polypeptide of embodiment G55, wherein the second target-binding domain comprises a soluble human IL-21.

### Embodiment G57

[2213] The multi-chain chimeric polypeptide of any one of embodiments G48-G53, wherein the second chimeric polypeptide further comprises an additional target-binding domain that binds specifically to a receptor for IL-21.

### Embodiment G58

[2214] The multi-chain chimeric polypeptide of embodiment G57, wherein the additional target-binding domain comprises a soluble IL-21.

### Embodiment G59

[2215] The multi-chain chimeric polypeptide of embodiment G58, wherein the soluble IL-21 is a soluble human IL-21.

### Embodiment G60

[2216] The multi-chain chimeric polypeptide of any one of embodiments G1-G34, wherein the first target-binding domain and the second target-binding domain each independently bind specifically to a receptor for IL-7.

### Embodiment G61

[2217] The multi-chain chimeric polypeptide of embodiment G60, wherein the first target-binding domain and the second target-binding domain include a soluble IL-7.

### Embodiment G62

[2218] The multi-chain chimeric polypeptide of embodiment G61, wherein the soluble IL-7 is a soluble human IL-7.

### Embodiment G63

[2219] The multi-chain chimeric polypeptide of any one of embodiments G1-G34, wherein the first target-binding domain and the second target-binding domain each independently bind specifically to TGF-0.

### Embodiment G64

[2220] The multi-specific chimeric polypeptide of embodiment G63, wherein the first target-binding domain and the second target-binding domain is a soluble TGF-β receptor.

### Embodiment G65

[2221] The multi-specific chimeric polypeptide of embodiment G64, wherein the soluble TGF-β receptor is a soluble TGFβRII receptor.

### Embodiment G66

[2222] The multi-specific chimeric polypeptide of any one of embodiments G1-G34, wherein the first target-binding domain and the second targeting-binding domain each independently bind specifically to a receptor for IL-7, a receptor for IL-21, or a receptor for CD137L.

### Embodiment G67

[2223] The multi-chain chimeric polypeptide of embodiment G66, wherein the first target-binding domain binds specifically to a receptor for IL-7 and the second target-binding domain binds specifically to a receptor for IL-21 or a receptor for CD137L.

### Embodiment G68

[2224] The multi-specific chimeric polypeptide of embodiment G67, wherein the first target-binding domain is a soluble IL-7.

### Embodiment G69

[2225] The multi-specific chimeric polypeptide of embodiment G68, wherein the soluble IL-7 is a soluble human IL-7.

### Embodiment G70

[2226] The multi-chain chimeric polypeptide of any one of embodiments G67-G69, wherein the second target-binding domain binds specifically to a receptor for IL-21.

### Embodiment G71

[2227] The multi-chain chimeric polypeptide of embodiment G70, wherein the second target-binding domain is a soluble IL-21.

### Embodiment G72

[2228] The multi-chain chimeric polypeptide of embodiment G71, wherein the soluble IL-21 is a soluble human IL-21.

### Embodiment G73

[2229] The multi-chain chimeric polypeptide of any one of embodiments G67-G69, wherein the second antigen-binding domain binds specifically to a receptor for CD137L.

### Embodiment G74

[2230] The multi-chain chimeric polypeptide of embodiment G73, wherein the second antigen-binding domain is a soluble CD137L.

### Embodiment G75

[2231] The multi-chain chimeric polypeptide of embodiment G74, wherein the soluble CD137L is a soluble human CD137L.

### Embodiment G76

[2232] The multi-chain chimeric polypeptide of any one of embodiments G67-G72, wherein the second chimeric polypeptide further comprises an additional target-binding domain that binds specifically to a receptor for CD137L.

### Embodiment G77

[2233] The multi-chain chimeric polypeptide of embodiment G76, wherein the additional target-binding domain comprises a soluble CD137L.

### Embodiment G78

[2234] The multi-chain chimeric polypeptide of embodiment G77, wherein the soluble CD137L is a soluble human CD137L.

### Embodiment G79

[2235] The multi-chain chimeric polypeptide of any one of embodiments G1-G34, wherein the first target-binding domain and the second targeting-binding domain each independently bind specifically to a receptor for IL-7 or TGF-0.

### Embodiment G80

[2236] The multi-chain chimeric polypeptide of embodiment G79, wherein the first target-binding domain binds specifically to a receptor IL-7 and the second target-binding domain binds specifically to TGF-0.

### Embodiment G81

[2237] The multi-chain chimeric polypeptide of embodiment G80, wherein the first target-binding domain comprises a soluble IL-7 protein.

### Embodiment G82

[2238] The multi-chain chimeric polypeptide of embodiment G81, wherein the soluble IL-7 protein is a soluble human IL-7.

### Embodiment G83

[2239] The multi-chain chimeric polypeptide of any one of embodiments G80-G82, wherein the second antigen-binding domain comprises an antigen-binding domain that binds specifically to TGF-β.

### Embodiment G84

[2240] The multi-specific chimeric polypeptide of embodiment G83, wherein the second target-binding domain is a soluble TGF-β receptor.

### Embodiment G85

[2241] The multi-specific chimeric polypeptide of embodiment G84, wherein the soluble TGF-β receptor is a soluble TGFβRII receptor.

### Embodiment G86

[2242] The multi-chain chimeric polypeptide of any one of embodiments G1-G34, wherein the first target-binding domain and the second targeting-binding domain each independently bind specifically to TGF-β, a receptor for IL-21, or a receptor for CD137L.

### Embodiment G87

[2243] The multi-chain chimeric polypeptide of embodiment G86, wherein the first target-binding domain binds specifically to a TGF-β and the second target-binding domain binds specifically to a receptor for IL-21 or a receptor for CD137L.

### Embodiment G88

[2244] The multi-specific chimeric polypeptide of embodiment G87, wherein the first target-binding domain is a soluble TGF-β receptor.

### Embodiment G89

[2245] The multi-specific chimeric polypeptide of embodiment G88, wherein the soluble TGF-β receptor is a soluble TGFβRII receptor.

### Embodiment G90

[2246] The multi-specific chimeric polypeptide of any one of embodiments G87-G89, wherein the second target-binding domain binds specifically to a receptor for IL-21.

### Embodiment G91

[2247] The multi-chain chimeric polypeptide of embodiment G90, wherein the second target-binding domain comprises a soluble IL-21.

### Embodiment G92

[2248] The multi-chain chimeric polypeptide of embodiment G91, wherein the second target-binding domain comprises a soluble human IL-21.

### Embodiment G93

[2249] The multi-specific chimeric polypeptide of any one of embodiments G87-G89, wherein the second target-binding domain binds specifically to a receptor for CD137L.

### Embodiment G94

[2250] The multi-chain chimeric polypeptide of embodiment G93, wherein the second target-binding domain comprises a soluble CD137L.

### Embodiment G95

[2251] The multi-chain chimeric polypeptide of embodiment G94, wherein the second target-binding domain comprises a soluble human CD137L.

### Embodiment G96

[2252] The multi-chain chimeric polypeptide of any one of embodiments G87-G92, wherein the second chimeric polypeptide further comprises an additional target-binding domain that binds specifically to a receptor for CD137L.

### Embodiment G97

[2253] The multi-chain chimeric polypeptide of embodiment G96, wherein the additional target-binding domain comprises a soluble CD137L.

### Embodiment G98

[2254] The multi-chain chimeric polypeptide of embodiment G97, wherein the soluble CD137L is a soluble human CD137L.

### Embodiment G99

[2255] The multi-chain chimeric polypeptide of any one of embodiments G1-G34, wherein the first target-binding domain and the second targeting-binding domain each independently bind specifically to TGF-β or a receptor for IL-21.

### Embodiment G100

[2256] The multi-chain chimeric polypeptide of embodiment G99, wherein the first target-binding domain binds specifically to a TGF-β and the second target-binding domain binds specifically to TGF-β or a receptor for IL-21.

### Embodiment G101

[2257] The multi-specific chimeric polypeptide of embodiment G100, wherein the first target-binding domain is a soluble TGF-β receptor.

### Embodiment G102

[2258] The multi-specific chimeric polypeptide of embodiment G101, wherein the soluble TGF-β receptor is a soluble TGFβRII receptor.

### Embodiment G103

[2259] The multi-specific chimeric polypeptide of any one of embodiments G100-G102, wherein the second target-binding domain binds specifically to a receptor for IL-21.

### Embodiment G104

[2260] The multi-chain chimeric polypeptide of embodiment G103, wherein the second target-binding domain comprises a soluble IL-21.

### Embodiment G105

[2261] The multi-chain chimeric polypeptide of embodiment G104, wherein the second target-binding domain comprises a soluble human IL-21.

### Embodiment G106

[2262] The multi-specific chimeric polypeptide of any one of embodiments G100-G102, wherein the second target-binding domain binds specifically to TGF-0.

### Embodiment G107

[2263] The multi-specific chimeric polypeptide of embodiment G106, wherein the first target-binding domain is a soluble TGF-β receptor.

### Embodiment G108

[2264] The multi-specific chimeric polypeptide of embodiment G107, wherein the soluble TGF-β receptor is a soluble TGFβRII receptor.

### Embodiment G109

[2265] The multi-specific chimeric polypeptide of any one of embodiments G100-G105, wherein the second polypeptide further comprises an additional target-binding domain that binds specifically to TGF-β.

### Embodiment G110

[2266] The multi-specific chimeric polypeptide of embodiment G109, wherein the first target-binding domain is a soluble TGF-β receptor.

### Embodiment G111

[2267] The multi-specific chimeric polypeptide of embodiment G110, wherein the soluble TGF-β receptor is a soluble TGFβRII receptor.

### Embodiment G112

[2268] The multi-chain chimeric polypeptide of any one of embodiments G1-G34, wherein the first target-binding domain and the second targeting-binding domain each independently bind specifically to TGF-β or IL-16.

### Embodiment G113

[2269] The multi-chain chimeric polypeptide of embodiment G112, wherein the first target-binding domain binds specifically to a TGF-β and the second target-binding domain binds specifically to TGF-β or IL-16.

### Embodiment G114

[2270] The multi-specific chimeric polypeptide of embodiment G113, wherein the first target-binding domain is a soluble TGF-β receptor.

### Embodiment G115

[2271] The multi-specific chimeric polypeptide of embodiment G114, wherein the soluble TGF-β receptor is a soluble TGFβRII receptor.

### Embodiment G116

[2272] The multi-specific chimeric polypeptide of any one of embodiments G113-G115, wherein the second target-binding domain binds specifically to IL-16.

### Embodiment G117

[2273] The multi-specific chimeric polypeptide of embodiment G116, wherein the second antigen-binding domain comprises an antigen-binding domain that binds specifically to CD16.

### Embodiment G118

[2274] The multi-chain chimeric polypeptide of embodiment G117, wherein the second antigen-binding domain comprises an scFv that binds specifically to CD16.

### Embodiment G119

[2275] The multi-specific chimeric polypeptide of any one of embodiments G113-G115, wherein the second target-binding domain binds specifically to TGF-0.

### Embodiment G120

[2276] The multi-specific chimeric polypeptide of embodiment G119, wherein the first target-binding domain is a soluble TGF-β receptor.

### Embodiment G121

[2277] The multi-specific chimeric polypeptide of embodiment G120, wherein the soluble TGF-β receptor is a soluble TGFβRII receptor.

### Embodiment G122

[2278] The multi-specific chimeric polypeptide of any one of embodiments G113-G118, wherein the second chimeric polypeptide further comprises an additional target-binding domain that binds specifically to TGF-β.

### Embodiment G123

[2279] The multi-specific chimeric polypeptide of embodiment G122, wherein the first target-binding domain is a soluble TGF-β receptor.

### Embodiment G124

[2280] The multi-specific chimeric polypeptide of embodiment G123, wherein the soluble TGF-β receptor is a soluble TGFβRII receptor.

### Embodiment G125

[2281] The multi-chain chimeric polypeptide of any one of embodiments G1-G34, wherein the first target-binding domain and the second targeting-binding domain each independently bind specifically to a TGF-β or a receptor for CD137L.

### Embodiment G126

[2282] The multi-chain chimeric polypeptide of embodiment G125, wherein the first target-binding domain binds specifically to TGF-β and the second target-binding domain binds specifically to a receptor for CD137L.

### Embodiment G127

[2283] The multi-specific chimeric polypeptide of embodiment G126, wherein the first target-binding domain is a soluble TGF-β receptor.

### Embodiment G128

[2284] The multi-specific chimeric polypeptide of embodiment G127, wherein the soluble TGF-β receptor is a soluble TGFβRII receptor.

### Embodiment G129

[2285] The multi-chain chimeric polypeptide of embodiment G128, wherein the second target-binding domain comprises a soluble CD137L protein.

### Embodiment G130

[2286] The multi-chain chimeric polypeptide of embodiment G129, wherein the soluble CD137L protein is a soluble human CD137L.

### Embodiment G131

[2287] The multi-chain chimeric polypeptide of any one of embodiments G126-G130, wherein the second chimeric polypeptide further comprises an additional target-binding domain that binds specifically to TGF-β.

### Embodiment G132

[2288] The multi-specific chimeric polypeptide of embodiment G131, wherein the additional target-binding domain is a soluble TGF-β receptor.

### Embodiment G133

[2289] The multi-specific chimeric polypeptide of embodiment G132, wherein the soluble TGF-β receptor is a soluble TGFβRII receptor.

### Embodiment G134

[2290] The multi-chain chimeric polypeptide of embodiment G1, wherein the first chimeric polypeptide comprises a sequence that is at least 80% identical to SEQ ID NO: 207.

### Embodiment G135

[2291] The multi-chain chimeric polypeptide of embodiment G134, wherein the first chimeric polypeptide comprises a sequence that is at least 90% identical to SEQ ID NO: 207.

### Embodiment G136

[2292] The multi-chain chimeric polypeptide of embodiment G135, wherein the first chimeric polypeptide comprises a sequence that is at least 95% identical to SEQ ID NO: 207.

### Embodiment G137

[2293] The multi-chain chimeric polypeptide of embodiment G136, wherein the first chimeric polypeptide comprises SEQ ID NO: 207.

### Embodiment G138

[2294] The multi-chain chimeric polypeptide of embodiment G137, wherein the first chimeric polypeptide comprises SEQ ID NO: 209.

### Embodiment G139

[2295] The multi-chain chimeric polypeptide of any one of embodiments G1 and G134-G138, wherein the second chimeric polypeptide comprises a sequence that is at least 80% identical to SEQ ID NO: 232.

### Embodiment G140

[2296] The multi-chain chimeric polypeptide of embodiment G139, wherein the second chimeric polypeptide comprises a sequence that is at least 90% identical to SEQ ID NO: 232.

### Embodiment G141

[2297] The multi-chain chimeric polypeptide of embodiment G140, wherein the second chimeric polypeptide comprises a sequence that is at least 95% identical to SEQ ID NO: 232.

### Embodiment G142

[2298] The multi-chain chimeric polypeptide of embodiment G141, wherein the second chimeric polypeptide comprises SEQ ID NO: 232.

### Embodiment G143

[2299] The multi-chain chimeric polypeptide of embodiment G142, wherein the second chimeric polypeptide comprises SEQ ID NO: 234.

### Embodiment G144

[2300] The multi-chain chimeric polypeptide of embodiment G1, wherein the first chimeric polypeptide comprises a sequence that is at least 80% identical to SEQ ID NO: 236.

### Embodiment G145

[2301] The multi-chain chimeric polypeptide of embodiment G144, wherein the first chimeric polypeptide comprises a sequence that is at least 90% identical to SEQ ID NO: 236.

### Embodiment G146

[2302] The multi-chain chimeric polypeptide of embodiment G145, wherein the first chimeric polypeptide comprises a sequence that is at least 95% identical to SEQ ID NO: 236.

### Embodiment G147

[2303] The multi-chain chimeric polypeptide of embodiment G146, wherein the first chimeric polypeptide comprises SEQ ID NO: 236.

### Embodiment G148

[2304] The multi-chain chimeric polypeptide of embodiment G147, wherein the first chimeric polypeptide comprises SEQ ID NO: 238.

### Embodiment G149

[2305] The multi-chain chimeric polypeptide of any one of embodiments G1 and G144-G148, wherein the second chimeric polypeptide comprises a sequence that is at least 80% identical to SEQ ID NO: 232.

### Embodiment G150

[2306] The multi-chain chimeric polypeptide of embodiment G149, wherein the second chimeric polypeptide comprises a sequence that is at least 90% identical to SEQ ID NO: 232.

### Embodiment G151

[2307] The multi-chain chimeric polypeptide of embodiment G150, wherein the second chimeric polypeptide comprises a sequence that is at least 95% identical to SEQ ID NO: 232.

### Embodiment G152

[2308] The multi-chain chimeric polypeptide of embodiment G151, wherein the second chimeric polypeptide comprises SEQ ID NO: 232.

### Embodiment G153

[2309] The multi-chain chimeric polypeptide of embodiment G152, wherein the second chimeric polypeptide comprises SEQ ID NO: 234.

### Embodiment G154

[2310] The multi-chain chimeric polypeptide of embodiment G1, wherein the first chimeric polypeptide comprises a sequence that is at least 80% identical to SEQ ID NO: 207.

### Embodiment G155

[2311] The multi-chain chimeric polypeptide of embodiment G154, wherein the first chimeric polypeptide comprises a sequence that is at least 90% identical to SEQ ID NO: 207.

### Embodiment G156

[2312] The multi-chain chimeric polypeptide of embodiment G155, wherein the first chimeric polypeptide comprises a sequence that is at least 95% identical to SEQ ID NO: 207.

### Embodiment G157

[2313] The multi-chain chimeric polypeptide of embodiment G156, wherein the first chimeric polypeptide comprises SEQ ID NO: 207.

### Embodiment G158

[2314] The multi-chain chimeric polypeptide of embodiment G157, wherein the first chimeric polypeptide comprises SEQ ID NO: 209.

### Embodiment G159

[2315] The multi-chain chimeric polypeptide of any one of embodiments G1 and G154-G158, wherein the second chimeric polypeptide comprises a sequence that is at least 80% identical to SEQ ID NO: 203.

### Embodiment G160

[2316] The multi-chain chimeric polypeptide of embodiment G159, wherein the second chimeric polypeptide comprises a sequence that is at least 90% identical to SEQ ID NO: 203.

### Embodiment G161

[2317] The multi-chain chimeric polypeptide of embodiment G160, wherein the second chimeric polypeptide comprises a sequence that is at least 95% identical to SEQ ID NO: 203.

### Embodiment G162

[2318] The multi-chain chimeric polypeptide of embodiment G161, wherein the second chimeric polypeptide comprises SEQ ID NO: 203.

### Embodiment G163

[2319] The multi-chain chimeric polypeptide of embodiment G162, wherein the second chimeric polypeptide comprises SEQ ID NO: 250.

### Embodiment G164

[2320] The multi-chain chimeric polypeptide of embodiment G1, wherein the first chimeric polypeptide comprises a sequence that is at least 80% identical to SEQ ID NO: 236.

### Embodiment G165

[2321] The multi-chain chimeric polypeptide of embodiment G164, wherein the first chimeric polypeptide comprises a sequence that is at least 90% identical to SEQ ID NO: 236.

### Embodiment G166

[2322] The multi-chain chimeric polypeptide of embodiment G165, wherein the first chimeric polypeptide comprises a sequence that is at least 95% identical to SEQ ID NO: 236.

### Embodiment G167

[2323] The multi-chain chimeric polypeptide of embodiment G166, wherein the first chimeric polypeptide comprises SEQ ID NO: 236.

### Embodiment G168

[2324] The multi-chain chimeric polypeptide of embodiment G167, wherein the first chimeric polypeptide comprises SEQ ID NO: 238.

### Embodiment G169

[2325] The multi-chain chimeric polypeptide of any one of embodiments G1 and G164-G168, wherein the second chimeric polypeptide comprises a sequence that is at least 80% identical to SEQ ID NO: 193.

### Embodiment G170

[2326] The multi-chain chimeric polypeptide of embodiment G169, wherein the second chimeric polypeptide comprises a sequence that is at least 90% identical to SEQ ID NO: 193.

### Embodiment G171

[2327] The multi-chain chimeric polypeptide of embodiment G170, wherein the second chimeric polypeptide comprises a sequence that is at least 95% identical to SEQ ID NO: 193.

### Embodiment G172

[2328] The multi-chain chimeric polypeptide of embodiment G171, wherein the second chimeric polypeptide comprises SEQ ID NO: 193.

### Embodiment G173

[2329] The multi-chain chimeric polypeptide of embodiment G172, wherein the second chimeric polypeptide comprises SEQ ID NO: 195.

### Embodiment G174

[2330] The multi-chain chimeric polypeptide of embodiment G1, wherein the first chimeric polypeptide comprises a sequence that is at least 80% identical to SEQ ID NO: 207.

### Embodiment G175

[2331] The multi-chain chimeric polypeptide of embodiment G174, wherein the first chimeric polypeptide comprises a sequence that is at least 90% identical to SEQ ID NO: 207.

### Embodiment G176

[2332] The multi-chain chimeric polypeptide of embodiment G175, wherein the first chimeric polypeptide comprises a sequence that is at least 95% identical to SEQ ID NO: 207.

### Embodiment G177

[2333] The multi-chain chimeric polypeptide of embodiment G176, wherein the first chimeric polypeptide comprises SEQ ID NO: 207.

### Embodiment G178

[2334] The multi-chain chimeric polypeptide of embodiment G177, wherein the first chimeric polypeptide comprises SEQ ID NO: 209.

### Embodiment G179

[2335] The multi-chain chimeric polypeptide of any one of embodiments G1 and G174-G178, wherein the second chimeric polypeptide comprises a sequence that is at least 80% identical to SEQ ID NO: 268.

### Embodiment G180

[2336] The multi-chain chimeric polypeptide of embodiment G179, wherein the second chimeric polypeptide comprises a sequence that is at least 90% identical to SEQ ID NO: 268.

### Embodiment G181

[2337] The multi-chain chimeric polypeptide of embodiment G180, wherein the second chimeric polypeptide comprises a sequence that is at least 95% identical to SEQ ID NO: 268.

### Embodiment G182

[2338] The multi-chain chimeric polypeptide of embodiment G181, wherein the second chimeric polypeptide comprises SEQ ID NO: 268.

### Embodiment G183

[2339] The multi-chain chimeric polypeptide of embodiment G182, wherein the second chimeric polypeptide comprises SEQ ID NO: 270.

### Embodiment G184

[2340] The multi-chain chimeric polypeptide of embodiment G1, wherein the first chimeric polypeptide comprises a sequence that is at least 80% identical to SEQ ID NO: 207.

### Embodiment G185

[2341] The multi-chain chimeric polypeptide of embodiment G184, wherein the first chimeric polypeptide comprises a sequence that is at least 90% identical to SEQ ID NO: 207.

### Embodiment G186

[2342] The multi-chain chimeric polypeptide of embodiment G185, wherein the first chimeric polypeptide comprises a sequence that is at least 95% identical to SEQ ID NO: 207.

### Embodiment G187

[2343] The multi-chain chimeric polypeptide of embodiment G186, wherein the first chimeric polypeptide comprises SEQ ID NO: 207.

### Embodiment G188

[2344] The multi-chain chimeric polypeptide of embodiment G187, wherein the first chimeric polypeptide comprises SEQ ID NO: 209.

### Embodiment G189

[2345] The multi-chain chimeric polypeptide of any one of embodiments G1 and G184-G188, wherein the second chimeric polypeptide comprises a sequence that is at least 80% identical to SEQ ID NO: 272.

### Embodiment G190

[2346] The multi-chain chimeric polypeptide of embodiment G189, wherein the second chimeric polypeptide comprises a sequence that is at least 90% identical to SEQ ID NO: 272.

### Embodiment G191

[2347] The multi-chain chimeric polypeptide of embodiment G190, wherein the second chimeric polypeptide comprises a sequence that is at least 95% identical to SEQ ID NO: 272.

### Embodiment G192

[2348] The multi-chain chimeric polypeptide of embodiment G191, wherein the second chimeric polypeptide comprises SEQ ID NO: 272.

### Embodiment G193

[2349] The multi-chain chimeric polypeptide of embodiment G192, wherein the second chimeric polypeptide comprises SEQ ID NO: 272.

### Embodiment G194

[2350] The multi-chain chimeric polypeptide of embodiment G1, wherein the first chimeric polypeptide comprises a sequence that is at least 80% identical to SEQ ID NO: 207.

### Embodiment G195

[2351] The multi-chain chimeric polypeptide of embodiment G194, wherein the first chimeric polypeptide comprises a sequence that is at least 90% identical to SEQ ID NO: 207.

### Embodiment G196

[2352] The multi-chain chimeric polypeptide of embodiment G195, wherein the first chimeric polypeptide comprises a sequence that is at least 95% identical to SEQ ID NO: 207.

### Embodiment G197

[2353] The multi-chain chimeric polypeptide of embodiment G196, wherein the first chimeric polypeptide comprises SEQ ID NO: 207.

### Embodiment G198

[2354] The multi-chain chimeric polypeptide of embodiment G197, wherein the first chimeric polypeptide comprises SEQ ID NO: 209.

### Embodiment G199

[2355] The multi-chain chimeric polypeptide of any one of embodiments G1 and G194-G198, wherein the second chimeric polypeptide comprises a sequence that is at least 80% identical to SEQ ID NO: 193.

### Embodiment G200

[2356] The multi-chain chimeric polypeptide of embodiment G199, wherein the second chimeric polypeptide comprises a sequence that is at least 90% identical to SEQ ID NO: 193.

### Embodiment G201

[2357] The multi-chain chimeric polypeptide of embodiment G200, wherein the second chimeric polypeptide comprises a sequence that is at least 95% identical to SEQ ID NO: 193.

### Embodiment G202

[2358] The multi-chain chimeric polypeptide of embodiment G201, wherein the second chimeric polypeptide comprises SEQ ID NO: 193.

### Embodiment G203

[2359] The multi-chain chimeric polypeptide of embodiment G202, wherein the second chimeric polypeptide comprises SEQ ID NO: 195.

### Embodiment G204

[2360] The multi-chain chimeric polypeptide of embodiment G1, wherein the first chimeric polypeptide comprises a sequence that is at least 80% identical to SEQ ID NO: 236.

### Embodiment G205

[2361] The multi-chain chimeric polypeptide of embodiment G204, wherein the first chimeric polypeptide comprises a sequence that is at least 90% identical to SEQ ID NO: 236.

### Embodiment G206

[2362] The multi-chain chimeric polypeptide of embodiment G205, wherein the first chimeric polypeptide comprises a sequence that is at least 95% identical to SEQ ID NO: 236.

### Embodiment G207

[2363] The multi-chain chimeric polypeptide of embodiment G206, wherein the first chimeric polypeptide comprises SEQ ID NO: 236.

### Embodiment G208

[2364] The multi-chain chimeric polypeptide of embodiment G207, wherein the first chimeric polypeptide comprises SEQ ID NO: 238.

### Embodiment G209

[2365] The multi-chain chimeric polypeptide of any one of embodiments G1 and G204-G208, wherein the second chimeric polypeptide comprises a sequence that is at least 80% identical to SEQ ID NO: 268.

### Embodiment G210

[2366] The multi-chain chimeric polypeptide of embodiment G209, wherein the second chimeric polypeptide comprises a sequence that is at least 90% identical to SEQ ID NO: 268.

### Embodiment G211

[2367] The multi-chain chimeric polypeptide of embodiment G210, wherein the second chimeric polypeptide comprises a sequence that is at least 95% identical to SEQ ID NO: 268.

### Embodiment G212

[2368] The multi-chain chimeric polypeptide of embodiment G211, wherein the second chimeric polypeptide comprises SEQ ID NO: 268.

### Embodiment G213

[2369] The multi-chain chimeric polypeptide of embodiment G212, wherein the second chimeric polypeptide comprises SEQ ID NO: 270.

### Embodiment G214

[2370] The multi-chain chimeric polypeptide of embodiment G1, wherein the first chimeric polypeptide comprises a sequence that is at least 80% identical to SEQ ID NO: 236.

### Embodiment G215

[2371] The multi-chain chimeric polypeptide of embodiment G214, wherein the first chimeric polypeptide comprises a sequence that is at least 90% identical to SEQ ID NO: 236.

### Embodiment G216

[2372] The multi-chain chimeric polypeptide of embodiment G215, wherein the first chimeric polypeptide comprises a sequence that is at least 95% identical to SEQ ID NO: 236.

### Embodiment G217

[2373] The multi-chain chimeric polypeptide of embodiment G216, wherein the first chimeric polypeptide comprises SEQ ID NO: 236.

### Embodiment G218

[2374] The multi-chain chimeric polypeptide of embodiment G217, wherein the first chimeric polypeptide comprises SEQ ID NO: 238.

### Embodiment G219

[2375] The multi-chain chimeric polypeptide of any one of embodiments G1 and G214-G218, wherein the second chimeric polypeptide comprises a sequence that is at least 80% identical to SEQ ID NO: 300.

### Embodiment G220

[2376] The multi-chain chimeric polypeptide of embodiment G219, wherein the second chimeric polypeptide comprises a sequence that is at least 90% identical to SEQ ID NO: 300.

### Embodiment G221

[2377] The multi-chain chimeric polypeptide of embodiment G220, wherein the second chimeric polypeptide comprises a sequence that is at least 95% identical to SEQ ID NO: 300.

### Embodiment G222

[2378] The multi-chain chimeric polypeptide of embodiment G221, wherein the second chimeric polypeptide comprises SEQ ID NO: 300.

### Embodiment G223

[2379] The multi-chain chimeric polypeptide of embodiment G222, wherein the second chimeric polypeptide comprises SEQ ID NO: 302.

### Embodiment G224

[2380] The multi-chain chimeric polypeptide of embodiment G1, wherein the first chimeric polypeptide comprises a sequence that is at least 80% identical to SEQ ID NO: 236.

### Embodiment G225

[2381] The multi-chain chimeric polypeptide of embodiment G224, wherein the first chimeric polypeptide comprises a sequence that is at least 90% identical to SEQ ID NO: 236.

### Embodiment G226

[2382] The multi-chain chimeric polypeptide of embodiment G225, wherein the first chimeric polypeptide comprises a sequence that is at least 95% identical to SEQ ID NO: 236.

### Embodiment G227

[2383] The multi-chain chimeric polypeptide of embodiment G226, wherein the first chimeric polypeptide comprises SEQ ID NO: 236.

### Embodiment G228

[2384] The multi-chain chimeric polypeptide of embodiment G227, wherein the first chimeric polypeptide comprises SEQ ID NO: 238.

### Embodiment G229

[2385] The multi-chain chimeric polypeptide of any one of embodiments G1 and G224-G228, wherein the second chimeric polypeptide comprises a sequence that is at least 80% identical to SEQ ID NO: 308.

### Embodiment G230

[2386] The multi-chain chimeric polypeptide of embodiment G229, wherein the second chimeric polypeptide comprises a sequence that is at least 90% identical to SEQ ID NO: 308.

### Embodiment G231

[2387] The multi-chain chimeric polypeptide of embodiment G230, wherein the second chimeric polypeptide comprises a sequence that is at least 95% identical to SEQ ID NO: 308.

### Embodiment G232

[2388] The multi-chain chimeric polypeptide of embodiment G231, wherein the second chimeric polypeptide comprises SEQ ID NO: 308.

### Embodiment G233

[2389] The multi-chain chimeric polypeptide of embodiment G232, wherein the second chimeric polypeptide comprises SEQ ID NO: 310.

### Embodiment G234

[2390] The multi-chain chimeric polypeptide of embodiment G1, wherein the first chimeric polypeptide comprises a sequence that is at least 80% identical to SEQ ID NO: 236.

### Embodiment G235

[2391] The multi-chain chimeric polypeptide of embodiment G234, wherein the first chimeric polypeptide comprises a sequence that is at least 90% identical to SEQ ID NO: 236.

### Embodiment G236

[2392] The multi-chain chimeric polypeptide of embodiment G235, wherein the first chimeric polypeptide comprises a sequence that is at least 95% identical to SEQ ID NO: 236.

### Embodiment G237

[2393] The multi-chain chimeric polypeptide of embodiment G236, wherein the first chimeric polypeptide comprises SEQ ID NO: 236.

### Embodiment G238

[2394] The multi-chain chimeric polypeptide of embodiment G237, wherein the first chimeric polypeptide comprises SEQ ID NO: 238.

### Embodiment G239

[2395] The multi-chain chimeric polypeptide of any one of embodiments G1 and G234-G238, wherein the second chimeric polypeptide comprises a sequence that is at least 80% identical to SEQ ID NO: 316.

### Embodiment G240

[2396] The multi-chain chimeric polypeptide of embodiment G239, wherein the second chimeric polypeptide comprises a sequence that is at least 90% identical to SEQ ID NO: 316.

### Embodiment G241

[2397] The multi-chain chimeric polypeptide of embodiment G240, wherein the second chimeric polypeptide comprises a sequence that is at least 95% identical to SEQ ID NO: 316.

### Embodiment G242

[2398] The multi-chain chimeric polypeptide of embodiment G241, wherein the second chimeric polypeptide comprises SEQ ID NO: 316.

### Embodiment G243

[2399] The multi-chain chimeric polypeptide of embodiment G242, wherein the second chimeric polypeptide comprises SEQ ID NO: 318.

### Embodiment G244

[2400] The multi-chain chimeric polypeptide of any one of embodiments G1-G133, wherein the first chimeric polypeptide further comprises one or more additional target-binding domain(s), where at least one of the one or more additional antigen-binding domain(s) is positioned between the soluble tissue factor domain and the first domain of the pair of affinity domains.

### Embodiment G245

[2401] The multi-chain chimeric polypeptide of embodiment G244, wherein the first chimeric polypeptide further comprises a linker sequence between the soluble tissue factor domain and the at least one of the one or more additional antigen-binding domain(s), and/or a linker sequence between the at least one of the one or more additional antigen-binding domain(s) and the first domain of the pair of affinity domains.

### Embodiment G246

[2402] The multi-chain chimeric polypeptide of any one of embodiments G1-G133, wherein the first chimeric polypeptide further comprises one or more additional target-binding domains at the N-terminal and/or C-terminal end of the first chimeric polypeptide.

### Embodiment G247

[2403] The multi-chain chimeric polypeptide of embodiment G246, wherein at least one of the one or more additional target-binding domains directly abuts the first domain of the pair of affinity domains in the first chimeric polypeptide.

### Embodiment G248

[2404] The multi-chain chimeric polypeptide of embodiment G246, wherein the first chimeric polypeptide further comprises a linker sequence between the at least one of the one or more additional target-binding domains and the first domain of the pair of affinity domains.

### Embodiment G249

[2405] The multi-chain chimeric polypeptide of embodiment G246, wherein the at least one of the one or more additional target-binding domains directly abuts the first target-binding domain in the first chimeric polypeptide.

### Embodiment G250

[2406] The multi-chain chimeric polypeptide of embodiment G246, wherein the first chimeric polypeptide further comprises a linker sequence between the at least one of the one or more additional target-binding domains and the first target-binding domain.

### Embodiment G251

[2407] The multi-chain chimeric polypeptide of embodiment G246, wherein at least one of the one or more additional target-binding domains is disposed at the N- and/or C-terminus of the first chimeric polypeptide, and at least one of the one or more additional target-binding domains is positioned between the soluble tissue factor domain and the first domain of the pair of affinity domains in the first chimeric polypeptide.

### Embodiment G252

[2408] The multi-chain chimeric polypeptide of embodiment G251, wherein the at least one additional target-binding domain of the one or more additional target-binding domains disposed at the N-terminus directly abuts the first target-binding domain or the first domain of the pair of affinity domains in the first chimeric polypeptide.

### Embodiment G253

[2409] The multi-chain chimeric polypeptide of embodiment G251, wherein the first chimeric polypeptide further comprises a linker sequence disposed between the at least one additional target-binding domain and the first target-binding domain or the first domain of the pair of affinity domains in the first chimeric polypeptide.

### Embodiment G254

[2410] The multi-chain chimeric polypeptide of embodiment G251, wherein the at least one additional target-binding domain of the one or more additional target-binding domains disposed at the C-terminus directly abuts the first target-binding domain or the first domain of the pair of affinity domains in the first chimeric polypeptide.

### Embodiment G255

[2411] The multi-chain chimeric polypeptide of embodiment G251, wherein the first chimeric polypeptide further comprises a linker sequence disposed between the at least one additional target-binding domain and the first target-binding domain or the first domain of the pair of affinity domains in the first chimeric polypeptide.

### Embodiment G256

[2412] The multi-chain chimeric polypeptide of embodiment G251, wherein the at least one of the one or more additional target-binding domains positioned between the soluble tissue factor domain and the first domain of the pair of affinity domains, directly abuts the soluble tissue factor domain and/or the first domain of the pair of affinity domains.

### Embodiment G257

[2413] The multi-chain chimeric polypeptide of embodiment G251, wherein the first chimeric polypeptide further comprises a linker sequence disposed (i) between the soluble tissue factor domain and the at least one of the one or more additional target-binding domains positioned between the soluble tissue factor domain and the first domain of the pair of affinity domains, and/or (ii) between the first domain of the pair of affinity domains and the at least one of the one or more additional target-binding domains positioned between the soluble tissue factor domain and the first domain of the pair of affinity domains.

### Embodiment G258

[2414] The multi-chain chimeric polypeptide of any one of embodiments G44-G46, G57-G59, G76-G78, G96-G98, G109-G111, G122-G124, and G131-G133, wherein the second chimeric polypeptide further comprises the additional target-binding domain at the N-terminal end or the C-terminal end of the second chimeric polypeptide.

### Embodiment G259

[2415] The multi-chain chimeric polypeptide of embodiment G258, wherein the additional target-binding domain directly abuts the second domain of the pair of affinity domains in the second chimeric polypeptide.

### Embodiment G260

[2416] The multi-chain chimeric polypeptide of embodiment G258, wherein the second chimeric polypeptide further comprises a linker sequence between the additional target-binding domain and the second domain of the pair of affinity domains in the second chimeric polypeptide.

### Embodiment G261

[2417] The multi-chain chimeric polypeptide of embodiment G258, wherein the additional target-binding domain directly abuts the second target-binding domain in the second chimeric polypeptide.

### Embodiment G262

[2418] The multi-chain chimeric polypeptide of embodiment G258, wherein the second chimeric polypeptide further comprises a linker sequence between the additional target-binding domain and the second target-binding domain in the second chimeric polypeptide.

### Embodiment G263

[2419] A composition comprising any of the multi-chain chimeric polypeptides of embodiments G1-G262.

### Embodiment G264

[2420] The composition of embodiment G263, wherein the composition is a pharmaceutical composition.

### Embodiment G265

[2421] A kit comprising at least one dose of the composition of embodiment G263 or G264.

### Embodiment G266

[2422] Nucleic acid encoding any of the multi-chain chimeric polypeptides of any one of embodiments G1-G262.

### Embodiment G267

[2423] A vector comprising the nucleic acid of embodiment G266.

### Embodiment G268

[2424] The vector of embodiment G267, wherein the vector is an expression vector.

### Embodiment G269

[2425] A cell comprising the nucleic acid of embodiment G323 or the vector of embodiment G267 or G268.

### Embodiment G270

[2426] A method of producing a multi-chain chimeric polypeptide, the method comprising:

[2427] culturing the cell of embodiment G269 in a culture medium under conditions sufficient to result in the production of the multi-chain chimeric polypeptide; and

[2428] recovering the multi-chain chimeric polypeptide from the cell and/or the culture medium.

### Embodiment G271

[2429] A multi-chain chimeric polypeptide produced by the method of embodiment G270.

### Embodiment G272

[2430] The multi-chain chimeric polypeptide of embodiment G8, wherein the soluble human tissue factor domain comprises a sequence that is at least 80% identical to SEQ ID NO: 97.

### Embodiment G273

[2431] The multi-chain chimeric polypeptide of embodiment G272, wherein the soluble human tissue factor domain comprises a sequence that is at least 90% identical to SEQ ID NO: 97.

### Embodiment G274

[2432] The multi-chain chimeric polypeptide of embodiment G273, wherein the soluble human tissue factor domain comprises a sequence that is at least 95% identical to SEQ ID NO: 97.

### Embodiment G275

[2433] The multi-chain chimeric polypeptide of embodiment G274, wherein the soluble human tissue factor domain comprises a sequence that is 100% identical to SEQ ID NO: 97.

### Embodiment G276

[2434] The multi-chain chimeric polypeptide of embodiment G8, wherein the soluble human tissue factor domain comprises a sequence that is at least 80% identical to SEQ ID NO: 98.

### Embodiment G277

[2435] The multi-chain chimeric polypeptide of embodiment G276, wherein the soluble human tissue factor domain comprises a sequence that is at least 90% identical to SEQ ID NO: 98.

### Embodiment G278

[2436] The multi-chain chimeric polypeptide of embodiment G277, wherein the soluble human tissue factor domain comprises a sequence that is at least 95% identical to SEQ ID NO: 98.

### Embodiment G279

[2437] The multi-chain chimeric polypeptide of embodiment G278, wherein the soluble human tissue factor domain comprises a sequence that is 100% identical to SEQ ID NO: 98.

### Embodiment H1

[2438] A method of treating an aging-related disease or condition in a subject in need thereof, the method comprising administering to a subject identified as having an aging-related disease or condition a therapeutically effective amount of one or more natural killer (NK) cell activating agent(s).

### Embodiment H2

[2439] A method of killing or reducing the number of senescent cells in a subject in need thereof, the method comprising administering to the subject a therapeutically effective amount of one or more NK cell activating agent(s).

### Embodiment H3

[2440] The method of embodiment H2, wherein the senescent cells are senescent cancer cells, senescent monocytes, senescent lymphocytes, senescent astrocytes, senescent microglia, senescent neurons, senescent tissue fibroblasts, senescent dermal fibroblasts, senescent keratinocytes, or other differentiated tissue-specific dividing functional cells.

### Embodiment H4

[2441] The method of embodiment H3, wherein the senescent cancer cells are chemotherapy-induced senescent cells or radiation-induced senescent cells.

### Embodiment H5

[2442] The method of embodiment H2, wherein the subject has been identified or diagnosed as having an aging-related disease or condition.

### Embodiment H6

[2443] The method of embodiment H1 or H5, wherein the aging-related disease or condition is selected from the group consisting of: a cancer, an autoimmune disease, a metabolic disease, a neurodegenerative disease, a cardiovascular disease, a skin disease, a progeria disease, and a fragility disease.

### Embodiment H7

[2444] The method of embodiment H6, wherein the cancer is selected from the group consisting of: solid tumor, hematological tumor, sarcoma, osteosarcoma, glioblastoma, neuroblastoma, melanoma, rhabdomyosarcoma, Ewing sarcoma, osteosarcoma, B-cell neoplasms, multiple myeloma, B-cell lymphoma, B-cell non-Hodgkin's lymphoma, Hodgkin's lymphoma, chronic lymphocytic leukemia (CLL), acute myeloid leukemia (AML), chronic myeloid leukemia (CML), acute lymphocytic leukemia (ALL), myelodysplastic syndromes (MDS), cutaneous T-cell lymphoma, retinoblastoma, stomach cancer, urothelial carcinoma, lung cancer, renal cell carcinoma, gastric and esophageal cancer, pancreatic cancer, prostate cancer, breast cancer, colorectal cancer, ovarian cancer, non-small cell lung carcinoma, squamous cell head and neck carcinoma, endometrial cancer, cervical cancer, liver cancer, and hepatocellular carcinoma.

### Embodiment H8

[2445] The method of embodiment H6, wherein the autoimmune disease is type-1 diabetes.

### Embodiment H9

[2446] The method of embodiment H6, wherein the metabolic disease is selected from the group consisting of: obesity, a lipodystrophy, and type 2 diabetes mellitus.

### Embodiment H10

[2447] The method of embodiment H6, wherein the neurodegenerative disease is selected from the group consisting of: Alzheimer's disease, Parkinson's disease, and dementia.

### Embodiment H11

[2448] The method of embodiment H6, wherein the cardiovascular disease is selected from the group consisting of: coronary artery disease, atherosclerosis, and pulmonary arterial hypertension.

### Embodiment H12

[2449] The method of embodiment H6, wherein the skin disease is selected from the group consisting of: wound healing, alopecia, wrinkles, senile lentigo, skin thinning, xeroderma pigmentosum, and dyskeratosis congenita.

### Embodiment H13

[2450] The method of embodiment H6, wherein the progeria disease is selected from the group consisting of: progeria and Hutchinson-Gilford Progeria Syndrome.

### Embodiment H14

[2451] The method of embodiment H6, wherein the fragility disease is selected from the group consisting of: frailty, responsiveness to vaccination, osteoporosis, and sarcopenia.

### Embodiment H15

[2452] The method of embodiment H1 or H5, wherein the aging-related disease or condition is selected from the group of: age-related macular degeneration, osteoarthritis, adipose atrophy, idiopathic pulmonary fibrosis, kidney transplant failure, liver fibrosis, loss of bone mass, sarcopenia, age-associated loss of lung tissue elasticity, osteoporosis, age-associated renal dysfunction, and chemical-induced renal dysfunction.

### Embodiment H16

[2453] The method of embodiment H1 or H5, wherein the aging-related disease or condition is type 2 diabetes or atherosclerosis.

### Embodiment H17

[2454] The method of any one of embodiments H1-H16, wherein the administering results in a decrease in the number of senescent cells in a target tissue in the subject.

### Embodiment H18

[2455] The method of embodiment H17, wherein the target tissue is selected from the group consisting of: adipose tissue, pancreatic tissue, liver tissue, lung tissue, vasculature, bone tissue, central nervous system (CNS) tissue, eye tissue, skin tissue, muscle tissue, and secondary lympho-organ tissue.

### Embodiment H19

[2456] The method of any one of embodiments H1-H18, wherein the administering results in an increase in the expression levels of CD25, CD69, MTOR-C1, SREBP1, IFN-γ, and granzyme B in activated NK cells.

### Embodiment H20

[2457] A method of treating an aging-related disease or condition in a subject in need thereof, the method comprising administering to a subject identified as having an aging-related disease or condition a therapeutically effective number of activated NK cells.

### Embodiment H21

[2458] A method of killing or reducing the number of senescent cells in a subject in need thereof, the method comprising administering to the subject a therapeutically effective number of activated NK cells.

### Embodiment H22

[2459] The method of embodiment H21, wherein the senescent cells are senescent cancer cells, senescent monocytes, senescent lymphocytes, senescent astrocytes, senescent microglia, senescent neurons, senescent tissue fibroblasts, senescent dermal fibroblasts, senescent keratinocytes, or other differentiated tissue-specific dividing functional cells.

### Embodiment H23

[2460] The method of embodiment H22, wherein the senescent cancer cells are chemotherapy-induced senescent cells or radiation-induced senescent cells.

### Embodiment H24

[2461] The method of embodiment H21, wherein the subject has been identified or diagnosed as having an aging-related disease or condition.

### Embodiment H25

[2462] The method of embodiment H20 or H24, wherein the aging-related disease or condition is selected from the group consisting of: a cancer, an autoimmune disease, a metabolic disease, a neurodegenerative disease, a cardiovascular disease, a skin disease, a progeria disease, and a fragility disease.

### Embodiment H26

[2463] The method of embodiment H25, wherein the cancer is selected from the group consisting of: solid tumor, hematological tumor, sarcoma, osteosarcoma, glioblastoma, neuroblastoma, melanoma, rhabdomyosarcoma, Ewing sarcoma, osteosarcoma, B-cell neoplasms, multiple myeloma, B-cell lymphoma, B-cell non-Hodgkin's lymphoma, Hodgkin's lymphoma, chronic lymphocytic leukemia (CLL), acute myeloid leukemia (AML), chronic myeloid leukemia (CML), acute lymphocytic leukemia (ALL), myelodysplastic syndromes (MDS), cutaneous T-cell lymphoma, retinoblastoma, stomach cancer, urothelial carcinoma, lung cancer, renal cell carcinoma, gastric and esophageal cancer, pancreatic cancer, prostate cancer, breast cancer, colorectal cancer, ovarian cancer, non-small cell lung carcinoma, squamous cell head and neck carcinoma, endometrial cancer, cervical cancer, liver cancer, and hepatocellular carcinoma.

### Embodiment H27

[2464] The method of embodiment H25, wherein the autoimmune disease is type-1 diabetes.

### Embodiment H28

[2465] The method of embodiment H25, wherein the metabolic disease is selected from the group consisting of: obesity, a lipodystrophy, and type 2 diabetes mellitus.

### Embodiment H29

[2466] The method of embodiment H25, wherein the neurodegenerative disease is selected from the group consisting of: Alzheimer's disease, Parkinson's disease, and dementia.

### Embodiment H30

[2467] The method of embodiment H25, wherein the cardiovascular disease is selected from the group consisting of: coronary artery disease, atherosclerosis, and pulmonary arterial hypertension.

### Embodiment H31

[2468] The method of embodiment H25, wherein the skin disease is selected from the group consisting of: wound healing, alopecia, wrinkles, senile lentigo, skin thinning, xeroderma pigmentosum, and dyskeratosis congenita.

### Embodiment H32

[2469] The method of embodiment H25, wherein the progeria disease is selected from the group consisting of: progeria and Hutchinson-Gilford Progeria Syndrome.

### Embodiment H33

[2470] The method of embodiment H25, wherein the fragility disease is selected from the group consisting of: frailty, responsiveness to vaccination, osteoporosis, and sarcopenia.

### Embodiment H34

[2471] The method of embodiment H20 or H24, wherein the aging-related disease or condition is selected from the group consisting of: age-related macular degeneration, osteoarthritis, adipose atrophy, idiopathic pulmonary fibrosis, kidney transplant failure, liver fibrosis, loss of bone mass, sarcopenia, age-associated loss of lung tissue elasticity, osteoporosis, age-associated renal dysfunction, and chemical-induced renal dysfunction.

### Embodiment H35

[2472] The method of any one of embodiments H20-H34, wherein the method further comprises:

[2473] obtaining a resting NK cell; and

[2474] contacting the resting NK cell in vitro in a liquid culture medium comprising one or more NK cell activating agent(s), wherein the contacting results in the generation of the activated NK cells that are subsequently administered to the subject.

### Embodiment H36

[2475] The method of embodiment H35, wherein the resting NK cell is an autologous NK cell obtained from the subject.

### Embodiment H37

[2476] The method of embodiment H35, wherein the resting NK cell is an allogeneic resting NK cell.

### Embodiment H38

[2477] The method of embodiment H35, wherein the resting NK cell is an artificial NK cell.

### Embodiment H39

[2478] The method of embodiment H35, wherein the resting NK cell is a haploidentical resting NK cell.

### Embodiment H40

[2479] The method of any one of embodiments H35-H39, wherein the resting NK cell is a genetically-engineered NK cell carrying a chimeric antigen receptor or recombinant T cell receptor.

### Embodiment H41

[2480] The method of any one of embodiments H35-H40, wherein the method further comprises isolating the activated NK cells before the activated NK cells are administered to the subject.

### Embodiment H42

[2481] A method of improving the texture and/or appearance of skin and/or hair in a subject in need thereof over a period of time, the method comprising administering to the subject a therapeutically effective amount of one or more natural killer (NK) cell activating agent(s).

### Embodiment H43

[2482] A method of improving the texture and/or appearance of skin and/or hair in a subject in need thereof over a period of time, the method comprising administering to the subject a therapeutically effective number of activated NK cells.

### Embodiment H44

[2483] The method of embodiment H43, wherein the method further comprises:

[2484] obtaining a resting NK cell; and

[2485] contacting the resting NK cell in vitro in a liquid culture medium comprising one or more NK cell activating agent(s), wherein the contacting results in the generation of the activated NK cells that are subsequently administered to the subject.

### Embodiment H45

[2486] The method of embodiment H44, wherein the resting NK cell is an autologous NK cell obtained from the subject.

### Embodiment H46

[2487] The method of embodiment H44, wherein the resting NK cell is an allogeneic resting NK cell.

### Embodiment H47

[2488] The method of embodiment H44, wherein the resting NK cell is an artificial NK cell.

### Embodiment H48

[2489] The method of embodiment H44, wherein the resting NK cell is a haploidentical resting NK cell.

### Embodiment H49

[2490] The method of any one of embodiments H44-H48, wherein the resting NK cell is a genetically-engineered NK cell carrying a chimeric antigen receptor or recombinant T cell receptor.

### Embodiment H50

[2491] The method of any one of embodiments H44-H49, wherein the method further comprises isolating the activated NK cells before the activated NK cells are administered to the subject.

### Embodiment H51

[2492] The method of any one of embodiments H42-H50, wherein the method provides for an improvement in the texture and/or appearance of skin of the subject over the period of time.

### Embodiment H52

[2493] The method of embodiment H51, wherein the method results in a decrease in the rate of formation of wrinkles in the skin of the subject over the period of time.

### Embodiment H53

[2494] The method of embodiment H51 or H52, wherein the method results in an improvement in the coloration of skin of the subject over the period of time.

### Embodiment H54

[2495] The method of any one of embodiments H51-H53, wherein the method results in an improvement in the texture of skin of the subject over the period of time.

### Embodiment H55

[2496] The method of any one of embodiments H42-H50, wherein the method provides for an improvement in the texture and/or appearance of hair of the subject over the period of time.

### Embodiment H56

[2497] The method of embodiment H55, wherein the method results in a decrease in the rate of formation of gray hair in the subject over the period of time.

### Embodiment H57

[2498] The method of embodiment H55 or H56, wherein the method results in a decrease in the number of gray hairs of the subject over the period of time.

### Embodiment H58

[2499] The method of any one of embodiments H55-H57, wherein the method results in a decrease in the rate of hair loss in the subject over time.

### Embodiment H59

[2500] The method of any one of embodiments H55-H58, wherein the method results in an improvement in the texture of hair of the subject over the period of time.

### Embodiment H60

[2501] The method of any one of embodiments H42-H59, wherein the period of time is between about one month and about 10 years.

### Embodiment H61

[2502] The method of any one of embodiments H42-H60, wherein the method results in a decrease in the number of senescent dermal fibroblasts in the skin of the subject over the period of time.

### Embodiment H62

[2503] A method of assisting in the treatment of obesity in a subject in need thereof over a period of time, the method comprising administering to the subject a therapeutically effective amount of one or more natural killer (NK) cell activating agent(s).

### Embodiment H63

[2504] A method of assisting in the treatment of obesity in a subject in need thereof over a period of time, the method comprising administering to the subject a therapeutically effective number of activated NK cells.

### Embodiment H64

[2505] The method of embodiment H63, wherein the method further comprises:

[2506] obtaining a resting NK cell; and

[2507] contacting the resting NK cell in vitro in a liquid culture medium comprising one or more NK cell activating agent(s), wherein the contacting results in the generation of the activated NK cells that are subsequently administered to the subject.

### Embodiment H65

[2508] The method of embodiment H64, wherein the resting NK cell is an autologous NK cell obtained from the subject.

### Embodiment H66

[2509] The method of embodiment H64, wherein the resting NK cell is an allogeneic resting NK cell.

### Embodiment H67

[2510] The method of embodiment H64, wherein the resting NK cell is an artificial NK cell.

### Embodiment H68

[2511] The method of embodiment H64, wherein the resting NK cell is a haploidentical resting NK cell.

### Embodiment H69

[2512] The method of any one of embodiments H64-H68, wherein the resting NK cell is a genetically-engineered NK cell carrying a chimeric antigen receptor or recombinant T cell receptor.

### Embodiment H70

[2513] The method of any one of embodiments H64-H69, wherein the method further comprises isolating the activated NK cells before the activated NK cells are administered to the subject.

### Embodiment H71

[2514] The method of any one of embodiments H62-H70, wherein the method results in a decrease in the mass of the subject over the period of time.

### Embodiment H72

[2515] The method of any one of embodiments H62-H71, wherein the method results in a decrease in the body mass index (BMI) of the subject over the period of time.

### Embodiment H73

[2516] The method of any one of embodiments H62-H70, wherein the method results in a decrease in the rate of progression from pre-diabetes to type 2 diabetes in the subject.

### Embodiment H74

[2517] The method of any one of embodiments H62-H70, wherein the method results in a decrease in fasting serum glucose level in the subject.

### Embodiment H75

[2518] The method of any one of embodiments H62-H70, wherein the method results in an increase in insulin sensitivity in the subject.

### Embodiment H76

[2519] The method of any one of embodiments H62-H70, wherein the method results in a decrease in the severity of atherosclerosis in the subject.

### Embodiment H77

[2520] The method of any one of embodiments H62-H76, wherein the period of time is between about two weeks and about 10 years.

### Embodiment H78

[2521] The method of any one of embodiments H1-H19, H35-H42, H44-H62, and H64-H77, wherein at least one of the one or more NK cell activating agent(s) results in activation of one or more of: a receptor for IL-2, a receptor for IL-7, a receptor for IL-12, a receptor for IL-15, a receptor for IL-18, a receptor for IL-21, a receptor for IL-33, CD16, CD69, CD25, CD36, CD59, CD352, NKp80, DNAM-1, 2B4, NKp30, NKp44, NKp46, NKG2D, KIR2DS1, KIR2Ds2/3, KIR2DL4, KIR2DS4, KIR2DS5, and KIR3DS1.

### Embodiment H79

[2522] The method of embodiment H78, wherein the at least one of the one or more NK cell activating agent(s) that results in activation of a receptor for IL-2 is a soluble IL-2 or an agonistic antibody that binds specifically to an IL-2 receptor.

### Embodiment H80

[2523] The method of embodiment H78, wherein the at least one of the one or more NK cell activating agent(s) that results in activation of a receptor for IL-7 is a soluble IL-7 or an agonistic antibody that binds specifically to an IL-7 receptor.

### Embodiment H81

[2524] The method of embodiment H78, wherein the at least one of the one or more NK cell activating agent(s) that results in activation of a receptor for IL-12 is a soluble IL-12 or an agonistic antibody that binds specifically to an IL-12 receptor.

### Embodiment H82

[2525] The method of embodiment H78, wherein the at least one of the one or more NK cell activating agent(s) that results in activation of a receptor for IL-15 is a soluble IL-15 or an agonistic antibody that binds specifically to an IL-15 receptor.

### Embodiment H83

[2526] The method of embodiment H78, wherein the at least one of the one or more NK cell activating agent(s) that results in activation of a receptor for IL-21 is a soluble IL-21 or an agonistic antibody that binds specifically to an IL-21 receptor.

### Embodiment H84

[2527] The method of embodiment H78, wherein the at least one of the one or more NK cell activating agent(s) that results in activation of a receptor for IL-33 is a soluble IL-33 or an agonistic antibody that binds specifically to an IL-33 receptor.

### Embodiment H85

[2528] The method of embodiment H78, wherein the at least one of the one or more NK cell activating agent(s) that results in activation of a receptor for CD16 is an agonistic antibody that binds specifically to a CD16.

### Embodiment H86

[2529] The method of embodiment H78, wherein the at least one of the one or more NK cell activating agent(s) that results in activation of a receptor for CD69 is an agonistic antibody that binds specifically to a CD69.

### Embodiment H87

[2530] The method of embodiment H78, wherein the at least one of the one or more NK cell activating agent(s) that results in activation of a receptor for CD25, CD36, CD59 is an agonistic antibody that binds specifically to a CD25, CD6, CD59.

### Embodiment H88

[2531] The method of embodiment H78, wherein the at least one of the one or more NK cell activating agent(s) that results in activation of a receptor for CD352 is an agonistic antibody that binds specifically to a CD352.

### Embodiment H89

[2532] The method of embodiment H78, wherein the at least one of the one or more NK cell activating agent(s) that results in activation of a receptor for NKp80 is an agonistic antibody that binds specifically to an NKp80.

### Embodiment H90

[2533] The method of embodiment H78, wherein the at least one of the one or more NK cell activating agent(s) that results in activation of a receptor for DNAM-1 is an agonistic antibody that binds specifically to a DNAM-1.

### Embodiment H91

[2534] The method of embodiment H78, wherein the at least one of the one or more NK cell activating agent(s) that results in activation of a receptor for 2B4 is an agonistic antibody that binds specifically to a 2B4.

### Embodiment H92

[2535] The method of embodiment H78, wherein the at least one of the one or more NK cell activating agent(s) that results in activation of a receptor for NKp30 is an agonistic antibody that binds specifically to an NKp30.

### Embodiment H93

[2536] The method of embodiment H78, wherein the at least one of the one or more NK cell activating agent(s) that results in activation of a receptor for NKp44 is an agonistic antibody that binds specifically to an NKp44.

### Embodiment H94

[2537] The method of embodiment H78, wherein the at least one of the one or more NK cell activating agent(s) that results in activation of a receptor for NKp46 is an agonistic antibody that binds specifically to an NKp46.

### Embodiment H95

[2538] The method of embodiment H78, wherein the at least one of the one or more NK cell activating agent(s) that results in activation of a receptor for NKG2D is an agonistic antibody that binds specifically to an NKG2D.

### Embodiment H96

[2539] The method of embodiment H78, wherein the at least one of the one or more NK cell activating agent(s) that results in activation of a receptor for KIR2DS1 is an agonistic antibody that binds specifically to a KIR2DS1.

### Embodiment H97

[2540] The method of embodiment H78, wherein the at least one of the one or more NK cell activating agent(s) that results in activation of a receptor for KIR2DS2/3 is an agonistic antibody that binds specifically to a KIR2DS2/3.

### Embodiment H98

[2541] The method of embodiment H78, wherein the at least one of the one or more NK cell activating agent(s) that results in activation of a receptor for KIR2DL4 is an agonistic antibody that binds specifically to a KIR2DL4.

### Embodiment H99

[2542] The method of embodiment H78, wherein the at least one of the one or more NK cell activating agent(s) that results in activation of a receptor for KIR2DS4 is an agonistic antibody that binds specifically to a KIR2DS4.

### Embodiment H100

[2543] The method of embodiment H78, wherein the at least one of the one or more NK cell activating agent(s) that results in activation of a receptor for KIR2DS5 is an agonistic antibody that binds specifically to a KIR2DS5.

### Embodiment H101

[2544] The method of embodiment H78, wherein the at least one of the one or more NK cell activating agent(s) that results in activation of a receptor for KIR3DS1 is an agonistic antibody that binds specifically to a KIR3DS1.

### Embodiment H102

[2545] The method of any one of embodiments H1-H19, H35-H42, H44-H62, and H64-H101, wherein at least one of the one or more NK cell activating agent(s) results in a decrease in the activation of one or more of: PD-1, a TGF-β receptor, TIGIT, CD1, TIM-3, Siglec-7, IRP60, Tactile, IL1R8, NKG2A/KLRD1, KIR2DL1, KIR2DL2/3, KIR2DL5, KIR3DL1, KIR3DL2, ILT2/LIR-1, and LAG-2.

### Embodiment H103

[2546] The method of embodiment H102, wherein the at least one of the one or more NK cell activating agent(s) that results in a decrease in the activation of PD-1 is an antagonistic antibody that binds specifically to PD-1, a soluble PD-1, a soluble PD-L1, or an antibody that binds specifically to PD-L1.

### Embodiment H104

[2547] The method of embodiment H102, wherein at least one of the one or more NK cell activating agent(s) that results in a decrease in the activation of a TGF-β receptor is a soluble TGF-β receptor, an antibody that binds specifically to TGF-β, or an antagonistic antibody that binds specifically to a TGF-β receptor.

### Embodiment H105

[2548] The method of embodiment H102, wherein at least one of the one or more NK cell activating agent(s) that results in a decrease in the activation of TIGIT is an antagonistic antibody that binds specifically to TIGIT, a soluble TIGIT, or an antibody that binds specifically to a ligand of TIGIT.

### Embodiment H106

[2549] The method of embodiment H102, wherein at least one of the one or more NK cell activating agent(s) that results in a decrease in the activation of CD1 is an antagonistic antibody that binds specifically to CD1, a soluble CD1, or an antibody that binds specifically to a ligand of CD1.

### Embodiment H107

[2550] The method of embodiment H102, wherein at least one of the one or more NK cell activating agent(s) that results in a decrease in the activation of TIM-3 is an antagonistic antibody that binds specifically to TIM-3, a soluble TIM-3, or an antibody that binds specifically to a ligand of TIM-3.

### Embodiment H108

[2551] The method of embodiment H102, wherein at least one of the one or more NK cell activating agent(s) that results in a decrease in the activation of Siglec-7 is an antagonistic antibody that binds specifically to Siglec-7 or an antibody that binds specifically to a ligand of Siglec-7.

### Embodiment H109

[2552] The method of embodiment H102, wherein at least one of the one or more NK cell activating agent(s) that results in a decrease in the activation of IRP60 is an antagonistic antibody that binds specifically to IRP60 or an antibody that binds specifically to a ligand of IRP60.

### Embodiment H110

[2553] The method of embodiment H102, wherein at least one of the one or more NK cell activating agent(s) that results in a decrease in the activation of Tactile is an antagonistic antibody that binds specifically to Tactile or an antibody that binds specifically to a ligand of Tactile.

### Embodiment H111

[2554] The method of embodiment H102, wherein at least one of the one or more NK cell activating agent(s) that results in a decrease in the activation of IL1R8 is an antagonistic antibody that binds specifically to IL1R8 or an antibody that binds specifically to a ligand of IL1R8.

### Embodiment H112

[2555] The method of embodiment H102, wherein at least one of the one or more NK cell activating agent(s) that results in a decrease in the activation of NKG2A/KLRD1 is an antagonistic antibody that binds specifically to NKG2A/KLRD1 or an antibody that binds specifically to a ligand of NKG2A/KLRD1.

### Embodiment H113

[2556] The method of embodiment H102, wherein at least one of the one or more NK cell activating agent(s) that results in a decrease in the activation of KIR2DL1 is an antagonistic antibody that binds specifically to KIR2DL1 or an antibody that binds specifically to a ligand of KIR2DL1.

### Embodiment H114

[2557] The method of embodiment H102, wherein at least one of the one or more NK cell activating agent(s) that results in a decrease in the activation of KIR2DL2/3 is an antagonistic antibody that binds specifically to KIR2DL2/3 or an antibody that binds specifically to a ligand of KIR2DL2/3.

### Embodiment H115

[2558] The method of embodiment H102, wherein at least one of the one or more NK cell activating agent(s) that results in a decrease in the activation of KIR2DL5 is an antagonistic antibody that binds specifically to KIR2DL5 or an antibody that binds specifically to a ligand of KIR2DL5.

### Embodiment H116

[2559] The method of embodiment H102, wherein at least one of the one or more NK cell activating agent(s) that results in a decrease in the activation of KIR3DL1 is an antagonistic antibody that binds specifically to KIR3DL1 or an antibody that binds specifically to a ligand of KIR3DL1.

### Embodiment H117

[2560] The method of embodiment H102, wherein at least one of the one or more NK cell activating agent(s) that results in a decrease in the activation of KIR3DL2 is an antagonistic antibody that binds specifically to KIR3DL2 or an antibody that binds specifically to a ligand of KIR3DL2.

### Embodiment H118

[2561] The method of embodiment H102, wherein at least one of the one or more NK cell activating agent(s) that results in a decrease in the activation of ILT2/LIR-1 is an antagonistic antibody that binds specifically to ILT2/LIR-1 or an antibody that binds specifically to a ligand of ILT2/LIR-1.

### Embodiment H119

[2562] The method of embodiment H102, wherein at least one of the one or more NK cell activating agent(s) that results in a decrease in the activation of LAG-2 is an antagonistic antibody that binds specifically to LAG-2 or an antibody that binds specifically to a ligand of LAG-2.

### Embodiment H120

[2563] The method of any one of embodiments H1-H19, H35-H42, H44-H62, and H64-H77, wherein at least one of the one or more NK cell activating agent(s) is a single-chain chimeric polypeptide comprising:

[2564] (i) a first target-binding domain;

[2565] (ii) a soluble tissue factor domain; and

[2566] (iii) a second target-binding domain.

### Embodiment H121

[2567] The method of embodiment H120, wherein the first target-binding domain and the soluble tissue factor domain directly abut each other.

### Embodiment H122

[2568] The method of embodiment H120, wherein the single-chain chimeric polypeptide further comprises a linker sequence between the first target-binding domain and the soluble tissue factor domain.

### Embodiment H123

[2569] The method of any one of embodiments H120-H122, wherein the soluble tissue factor domain and the second target-binding domain directly abut each other.

### Embodiment H124

[2570] The method of any one of embodiments H120-H122, wherein the single-chain chimeric polypeptide further comprises a linker sequence between the soluble tissue factor domain and the second target-binding domain.

### Embodiment H125

[2571] The method of embodiment H120, wherein the first target-binding domain and the second target-binding domain directly abut each other.

### Embodiment H126

[2572] The method of embodiment H120, wherein the single-chain chimeric polypeptide further comprises a linker sequence between the first target-binding domain and the second target-binding domain.

### Embodiment H127

[2573] The method of embodiment H125 or H126, wherein the second target-binding domain and the soluble tissue factor domain directly abut each other.

### Embodiment H128

[2574] The method of embodiment H125 or H126, wherein the single-chain chimeric polypeptide further comprises a linker sequence between the second target-binding domain and the soluble tissue factor domain.

### Embodiment H129

[2575] The method of any one of embodiments H120-H128, wherein the first target-binding domain and the second target-binding domain bind specifically to the same antigen.

### Embodiment H130

[2576] The method of embodiment H129, wherein the first target-binding domain and the second target-binding domain bind specifically to the same epitope.

### Embodiment H131

[2577] The method of embodiment H130, wherein the first target-binding domain and the second target-binding domain comprise the same amino acid sequence.

### Embodiment H132

[2578] The method of any one of embodiments H120-H128, wherein the first target-binding domain and the second target-binding domain bind specifically to different antigens.

### Embodiment H133

[2579] The method of any one of embodiments H120-H132, wherein one or both of the first target-binding domain and the second target-binding domain is an antigen-binding domain.

### Embodiment H134

[2580] The method of embodiment H133, wherein the first target-binding domain and the second target-binding domain are each an antigen-binding domain.

### Embodiment H135

[2581] The method of embodiment H134, wherein antigen-binding domain comprises a scFv or a single domain antibody.

### Embodiment H136

[2582] The method of any one of embodiments H120-H135, wherein one or both of the first target-binding domain and the second target-binding domain bind to a target selected from the group consisting of: CD16a, CD33, CD20, CD19, CD22, CD123, PDL-1, TIGIT, PD-1, TIM3, CTLA4, MICA, MICB, IL-6, IL-8, TNFα, CD26, CD36, ULBP2, CD30, CD200, IGF-1R, MUC4AC, MUC5AC, Trop-2, CMET, EGFR, HER1, HER2, HER3, PSMA, CEA, B7H3, EPCAM, BCMA, P-cadherin, CEACAM5, a UL16-binding protein, HLA-DR, DLL4, TYRO3, AXL, MER, CD122, CD155, PDGF-DD, a ligand of TGF-β receptor II (TGF-βRII), a ligand of TGF-βRIII, a ligand of DNAM1, a ligand of NKp46, a ligand of NKp44, a ligand of NKG2D, a ligand of NKP30, a ligand for a scMHCI, a ligand for a scMHCII, a ligand for a scTCR, a receptor for PDGF-DD, a receptor for stem cell factor (SCF), a receptor for stem cell-like tyrosine kinase 3 ligand (FLT3L), a receptor for MICA, a receptor for MICB, a receptor for a ULP16-binding protein, a receptor for CD155, and a receptor for CD122.

### Embodiment H137

[2583] The method of any one of embodiments H120-H128, wherein one or both of the first target-binding domain and the second target-binding domain is a soluble interleukin or cytokine protein.

### Embodiment H138

[2584] The method of embodiment H137, wherein the soluble interleukin or cytokine protein is selected from the group consisting of: IL-1, IL-2, IL-3, IL-7, IL-8, IL-10, IL-12, IL-15, IL-17, IL-18, IL-21, PDGF-DD, and SCF.

### Embodiment H139

[2585] The method of any one of embodiments H120-H128, wherein one or both of the first target-binding domain and the second target-binding domain is a soluble interleukin or cytokine receptor.

### Embodiment H140

[2586] The method of embodiment H139, wherein the soluble interleukin or cytokine receptor is a soluble TGF-β receptor II (TGF-βRII) a soluble TGF-βRIII, a soluble receptor for TNFα, a soluble receptor for IL-4, or a soluble receptor for IL-10.

### Embodiment H141

[2587] The method of any one of embodiments H120-H140, wherein the soluble tissue factor domain is a soluble human tissue factor domain.

### Embodiment H142

[2588] The method of embodiment H141, wherein the soluble human tissue factor domain comprises a sequence that is at least 80% identical to SEQ ID NO: 93.

### Embodiment H143

[2589] The method of embodiment H142, wherein the soluble human tissue factor domain comprises a sequence that is at least 90% identical to SEQ ID NO: 93.

### Embodiment H144

[2590] The method of embodiment H143, wherein the soluble human tissue factor domain comprises a sequence that is at least 95% identical to SEQ ID NO: 93.

### Embodiment H145

[2591] The method of any one of embodiments H141-H144, wherein the soluble human tissue factor domain does not comprise one or more of:

[2592] a lysine at an amino acid position that corresponds to amino acid position 20 of mature wildtype human tissue factor protein;

[2593] an isoleucine at an amino acid position that corresponds to amino acid position 22 of mature wildtype human tissue factor protein;

[2594] a tryptophan at an amino acid position that corresponds to amino acid position 45 of mature wildtype human tissue factor protein;

[2595] an aspartic acid at an amino acid position that corresponds to amino acid position 58 of mature wildtype human tissue factor protein;

[2596] a tyrosine at an amino acid position that corresponds to amino acid position 94 of mature wildtype human tissue factor protein;

[2597] an arginine at an amino acid position that corresponds to amino acid position 135 of mature wildtype human tissue factor protein; and

[2598] a phenylalanine at an amino acid position that corresponds to amino acid position 140 of mature wildtype human tissue factor protein.

### Embodiment H146

[2599] The method of embodiment H145, wherein the soluble human tissue factor domain does not comprise any of:

[2600] a lysine at an amino acid position that corresponds to amino acid position 20 of mature wildtype human tissue factor protein;

[2601] an isoleucine at an amino acid position that corresponds to amino acid position 22 of mature wildtype human tissue factor protein;

[2602] a tryptophan at an amino acid position that corresponds to amino acid position 45 of mature wildtype human tissue factor protein;

[2603] an aspartic acid at an amino acid position that corresponds to amino acid position 58 of mature wildtype human tissue factor protein;

[2604] a tyrosine at an amino acid position that corresponds to amino acid position 94 of mature wildtype human tissue factor protein;

[2605] an arginine at an amino acid position that corresponds to amino acid position 135 of mature wildtype human tissue factor protein; and

[2606] a phenylalanine at an amino acid position that corresponds to amino acid position 140 of mature wildtype human tissue factor protein.

### Embodiment H147

[2607] The method of any one of embodiments H120-H146, wherein the soluble tissue factor domain is not capable of binding Factor VIIa.

### Embodiment H148

[2608] The method of any one of embodiments H120-H147, wherein the soluble tissue factor domain does not convert inactive Factor X into Factor Xa.

### Embodiment H149

[2609] The method of any one of embodiments H120-H148, wherein the single-chain chimeric polypeptide does not stimulate blood coagulation in a mammal.

### Embodiment H150

[2610] The method of any one of embodiments H120-H149, wherein the single-chain chimeric polypeptide further comprises one or more additional target-binding domains at its N- and/or C-terminus.

### Embodiment H151

[2611] The method of embodiment H150, wherein the single-chain chimeric polypeptide comprises one or more additional target-binding domains at its N-terminus.

### Embodiment H152

[2612] The method of embodiment H151, wherein one or more additional target-binding domains directly abuts the first target-binding domain, the second target-binding domain, or the soluble tissue factor domain.

### Embodiment H153

[2613] The method of embodiment H152, wherein the single-chain chimeric polypeptide further comprises a linker sequence between one of the at least one additional target-binding domains and the first target-binding domain, the second target-binding domain, or the soluble tissue factor domain.

### Embodiment H154

[2614] The method of embodiment H150, wherein the single-chain chimeric polypeptide comprises one or more additional target-binding domains at its C-terminus.

### Embodiment H155

[2615] The method of embodiment H154, wherein one of the one or more additional target-binding domains directly abuts the first target-binding domain, the second target-binding domain, or the soluble tissue factor domain.

### Embodiment H156

[2616] The method of embodiment H154, wherein the single-chain chimeric polypeptide further comprises a linker sequence between one of the at least one additional target-binding domains and the first target-binding domain, the second target-binding domain, or the soluble tissue factor domain.

### Embodiment H157

[2617] The method of embodiment H150, wherein the single-chain chimeric polypeptide comprises one or more additional target binding domains at its N-terminus and the C-terminus.

### Embodiment H158

[2618] The method of embodiment H157, wherein one of the one or more additional antigen binding domains at the N-terminus directly abuts the first target-binding domain, the second target-binding domain, or the soluble tissue factor domain.

### Embodiment H159

[2619] The method of embodiment H157, wherein the single-chain chimeric polypeptide further comprises a linker sequence between one of the one or more additional antigen-binding domains at the N-terminus and the first target-binding domain, the second target-binding domain, or the soluble tissue factor domain.

### Embodiment H160

[2620] The method of embodiment H157, wherein one of the one or more additional antigen binding domains at the C-terminus directly abuts the first target-binding domain, the second target-binding domain, or the soluble tissue factor domain.

### Embodiment H161

[2621] The method of embodiment H157, wherein the single-chain chimeric polypeptide further comprises a linker sequence between one of the one or more additional antigen-binding domains at the C-terminus and the first target-binding domain, the second target-binding domain, or the soluble tissue factor domain.

### Embodiment H162

[2622] The method of any one of embodiments H150-H161, wherein two or more of the first target-binding domain, the second target-binding domain, and the one or more additional target-binding domains bind specifically to the same antigen.

### Embodiment H163

[2623] The method of embodiment H162, wherein two or more of the first target-binding domain, the second target-binding domain, and the one or more additional target-binding domains bind specifically to the same epitope.

### Embodiment H164

[2624] The method of embodiment H163, wherein two or more of the first target-binding domain, the second target-binding domain, and the one or more additional target-binding domains comprise the same amino acid sequence.

### Embodiment H165

[2625] The method of embodiment H162, wherein the first target-binding domain, the second target-binding domain, and the one or more additional target-binding domains each bind specifically to the same antigen.

### Embodiment H166

[2626] The method of embodiment H165, wherein the first target-binding domain, the second target-binding domain, and the one or more additional target-binding domains each bind specifically to the same epitope.

### Embodiment H167

[2627] The method of embodiment H166, wherein the first target-binding domain, the second target-binding domain, and the one or more additional target-binding domains each comprise the same amino acid sequence.

### Embodiment H168

[2628] The method of any one of embodiments H150-H161, wherein the first target-binding domain, the second target-binding domain, and the one or more additional target-binding domains bind specifically to different antigens.

### Embodiment H169

[2629] The method of any one of embodiments H150-H168, wherein one or more of the first target-binding domain, the second target-binding domain, and the one or more target-binding domains is an antigen-binding domain.

### Embodiment H170

[2630] The method of embodiment H169, wherein the first target-binding domain, the second target-binding domain, and the one or more additional target-binding domains are each an antigen-binding domain.

### Embodiment H171

[2631] The method of embodiment H170, wherein antigen-binding domain comprises a scFv or a single domain antibody.

### Embodiment H172

[2632] The method of any one of embodiments H150-H171, wherein one or more of the first target-binding domain, the second target-binding domain, and the one or more target-binding domains bind specifically to a target selected from the group consisting of: CD16a, CD33, CD20, CD19, CD22, CD123, PDL-1, TIGIT, PD-1, TIM3, CTLA4, MICA, MICB, IL-6, IL-8, TNFα, CD26, CD36, ULBP2, CD30, CD200, IGF-1R, MUC4AC, MUC5AC, Trop-2, CMET, EGFR, HER1, HER2, HER3, PSMA, CEA, B7H3, EPCAM, BCMA, P-cadherin, CEACAM5, a UL16-binding protein, HLA-DR, DLL4, TYRO3, AXL, MER, CD122, CD155, PDGF-DD, a ligand of TGF-β receptor II (TGF-βRII), a ligand of TGF-βRIII, a ligand of DNAM1, a ligand of NKp46, a ligand of NKp44, a ligand of NKG2D, a ligand of NKP30, a ligand for a scMHCI, a ligand for a scMHCII, a ligand for a scTCR, a receptor for PDGF-DD, a receptor for stem cell factor (SCF), a receptor for stem cell-like tyrosine kinase 3 ligand (FLT3L), a receptor for MICA, a receptor for MICB, a receptor for a ULP16-binding protein, a receptor for CD155, and a receptor for CD122.

### Embodiment H173

[2633] The method of any one of embodiments H150-H161, wherein one or more of the first target-binding domain, the second target-binding domain, and the one or more additional target-binding domains is a soluble interleukin or cytokine protein.

### Embodiment H174

[2634] The method of embodiment H173, wherein the soluble interleukin or cytokine protein is selected from the group consisting of: IL-1, IL-2, IL-3, IL-7, IL-8, IL-10, IL-12, IL-15, IL-17, IL-18, IL-21, PDGF-DD, and SCF.

### Embodiment H175

[2635] The method of any one of embodiments H150-H161, wherein one or more of the first target-binding domain, the second target-binding domain, and the one or more additional target-binding domains is a soluble interleukin or cytokine receptor.

### Embodiment H176

[2636] The method of embodiment H175, wherein the soluble receptor is a soluble TGF-β receptor II (TGF-βRII) a soluble TGF-βRIII, a soluble receptor for TNFα, a soluble receptor for IL-4, or a soluble receptor for IL-10.

### Embodiment H177

[2637] The method of any one of embodiments H1-H19, H35-H42, H44-H62, and H64-H77, wherein at least one of the one or more NK cell activating agent(s) is a multi-chain chimeric polypeptide comprising:

[2638] (c) a first chimeric polypeptide comprising:
[2639] (i) a first target-binding domain;
[2640] (ii) a soluble tissue factor domain; and
[2641] (iii) a first domain of a pair of affinity domains;

[2642] (d) a second chimeric polypeptide comprising:
[2643] (i) a second domain of a pair of affinity domains; and
[2644] (ii) a second target-binding domain,

[2645] wherein the first chimeric polypeptide and the second chimeric polypeptide associate through the binding of the first domain and the second domain of the pair of affinity domains.

### Embodiment H178

[2646] The method of embodiment H177, wherein the first target-binding domain and the soluble tissue factor domain directly abut each other in the first chimeric polypeptide.

### Embodiment H179

[2647] The method of embodiment H177, wherein the first chimeric polypeptide further comprises a linker sequence between the first target-binding domain and the soluble tissue factor domain in the first chimeric polypeptide.

### Embodiment H180

[2648] The method of any one of embodiments H177-H179, wherein the soluble tissue factor domain and the first domain of the pair of affinity domains directly abut each other in the first chimeric polypeptide.

### Embodiment H181

[2649] The method of any one of embodiments H177-H179, wherein the first chimeric polypeptide further comprises a linker sequence between the soluble tissue factor domain and the first domain of the pair of affinity domains in the first chimeric polypeptide.

### Embodiment H182

[2650] The method of any one of embodiments H177-H181, wherein the second domain of the pair of affinity domains and the second target-binding domain directly abut each other in the second chimeric polypeptide.

### Embodiment H183

[2651] The method of any one of embodiments H177-H181, wherein second chimeric polypeptide further comprises a linker sequence between the second domain of the pair of affinity domains and the second target-binding domain in the second chimeric polypeptide.

### Embodiment H184

[2652] The method of any one of embodiments H177-H183, wherein the first target-binding domain and the second target-binding domain bind specifically to the same antigen.

### Embodiment H185

[2653] The method of embodiment H184, wherein the first target-binding domain and the second target-binding domain bind specifically to the same epitope.

### Embodiment H186

[2654] The method of embodiment H185, wherein the first target-binding domain and the second target-binding domain comprise the same amino acid sequence.

### Embodiment H187

[2655] The method of any one of embodiments H177-H183, wherein the first target-binding domain and the second target-binding domain bind specifically to different antigens.

### Embodiment H188

[2656] The method of any one of embodiments H177-H187, wherein one or both of the first target-binding domain and the second target-binding domain is an antigen-binding domain.

### Embodiment H189

[2657] The method of embodiment H188, wherein the first target-binding domain and the second target-binding domain are each antigen-binding domains.

### Embodiment H190

[2658] The method of embodiment H188 or H189, wherein antigen-binding domain comprises a scFv or a single domain antibody.

### Embodiment H191

[2659] The method of any one of embodiments H177-H190, wherein one or both of the first target-binding domain and the second target-binding domain bind specifically to a target selected from the group consisting of: CD16a, CD33, CD20, CD19, CD22, CD123, PDL-1, TIGIT, PD-1, TIM3, CTLA4, MICA, MICB, IL-6, IL-8, TNFα, CD26, CD36, ULBP2, CD30, CD200, IGF-1R, MUC4AC, MUC5AC, Trop-2, CMET, EGFR, HER1, HER2, HER3, PSMA, CEA, B7H3, EPCAM, BCMA, P-cadherin, CEACAM5, a UL16-binding protein, HLA-DR, DLL4, TYRO3, AXL, MER, CD122, CD155, PDGF-DD, a ligand of TGF-β receptor II (TGF-βRII), a ligand of TGF-βRIII, a ligand of DNAM1, a ligand of NKp46, a ligand of NKp44, a ligand of NKG2D, a ligand of NKP30, a ligand for a scMHCI, a ligand for a scMHCII, a ligand for a scTCR, a receptor for PDGF-DD, a receptor for stem cell factor (SCF), a receptor for stem cell-like tyrosine kinase 3 ligand (FLT3L), a receptor for MICA, a receptor for MICB, a receptor for a ULP16-binding protein, a receptor for CD155, and a receptor for CD122.

### Embodiment H192

[2660] The method of any one of embodiments H177-H183, wherein one or both of the first target-binding domain and the second target-binding domain is a soluble interleukin or cytokine protein.

### Embodiment H193

[2661] The method of embodiment H192, wherein the soluble interleukin or cytokine protein is selected from the group consisting of: IL-1, IL-2, IL-3, IL-7, IL-8, IL-10, IL-12, IL-15, IL-17, IL-18, IL-21, PDGF-DD, and SCF.

### Embodiment H194

[2662] The method of any one of embodiments H177-H183, wherein one or both of the first target-binding domain and the second target-binding domain is a soluble interleukin or cytokine receptor.

### Embodiment H195

[2663] The method of embodiment H194, wherein the soluble receptor is a soluble TGF-β receptor II (TGF-βRII) a soluble TGF-βRIII, a soluble receptor for TNFα, a soluble receptor for IL-4, or a soluble receptor for IL-10.

### Embodiment H196

[2664] The method of any one of embodiments H177-H195, wherein the first chimeric polypeptide further comprises one or more additional target-binding domain(s), where at least one of the one or more additional antigen-binding domain(s) is positioned between the soluble tissue factor domain and the first domain of the pair of affinity domains.

### Embodiment H197

[2665] The method of embodiment H196, wherein the first chimeric polypeptide further comprises a linker sequence between the soluble tissue factor domain and the at least one of the one or more additional antigen-binding domain(s), and/or a linker sequence between the at least one of the one or more additional antigen-binding domain(s) and the first domain of the pair of affinity domains.

### Embodiment H198

[2666] The method of any one of embodiments H177-H195, wherein the first chimeric polypeptide further comprises one or more additional target-binding domains at the N-terminal and/or C-terminal end of the first chimeric polypeptide.

### Embodiment H199

[2667] The method of embodiment H198, wherein at least one of the one or more additional target-binding domains directly abuts the first domain of the pair of affinity domains in the first chimeric polypeptide.

### Embodiment H200

[2668] The method of embodiment H198, wherein the first chimeric polypeptide further comprises a linker sequence between the at least one of the one or more additional target-binding domains and the first domain of the pair of affinity domains.

### Embodiment H201

[2669] The method of embodiment H198, wherein the at least one of the one or more additional target-binding domains directly abuts the first target-binding domain in the first chimeric polypeptide.

### Embodiment H202

[2670] The method of embodiment H198, wherein the first chimeric polypeptide further comprises a linker sequence between the at least one of the one or more additional target-binding domains and the first target-binding domain.

### Embodiment H203

[2671] The method of embodiment H198, wherein at least one of the one or more additional target-binding domains is disposed at the N- and/or C-terminus of the first chimeric polypeptide, and at least one of the one or more additional target-binding domains is positioned between the soluble tissue factor domain and the first domain of the pair of affinity domains in the first chimeric polypeptide.

### Embodiment H204

[2672] The method of embodiment H203, wherein the at least one additional target-binding domain of the one or more additional target-binding domains disposed at the N-terminus directly abuts the first target-binding domain or the first domain of the pair of affinity domains in the first chimeric polypeptide.

### Embodiment H205

[2673] The method of embodiment H203, wherein the first chimeric polypeptide further comprises a linker sequence disposed between the at least one additional target-binding domain and the first target-binding domain or the first domain of the pair of affinity domains in the first chimeric polypeptide.

### Embodiment H206

[2674] The method of embodiment H203, wherein the at least one additional target-binding domain of the one or more additional target-binding domains disposed at the C-terminus directly abuts the first target-binding domain or the first domain of the pair of affinity domains in the first chimeric polypeptide.

### Embodiment H207

[2675] The method of embodiment H203, wherein the first chimeric polypeptide further comprises a linker sequence disposed between the at least one additional target-binding domain and the first target-binding domain or the first domain of the pair of affinity domains in the first chimeric polypeptide.

### Embodiment H208

[2676] The method of embodiment H203, wherein the at least one of the one or more additional target-binding domains positioned between the soluble tissue factor domain and the first domain of the pair of affinity domains, directly abuts the soluble tissue factor domain and/or the first domain of the pair of affinity domains.

### Embodiment H209

[2677] The method of embodiment H203, wherein the first chimeric polypeptide further comprises a linker sequence disposed (i) between the soluble tissue factor domain and the at least one of the one or more additional target-binding domains positioned between the soluble tissue factor domain and the first domain of the pair of affinity domains, and/or (ii) between the first domain of the pair of affinity domains and the at least one of the one or more additional target-binding domains positioned between the soluble tissue factor domain and the first domain of the pair of affinity domains.

### Embodiment H210

[2678] The method of any one of embodiments H177-H209, wherein the second chimeric polypeptide further comprises one or more additional target-binding domains at the N-terminal end or the C-terminal end of the second chimeric polypeptide.

### Embodiment H211

[2679] The method of embodiment H210, wherein at least one of the one or more additional target-binding domains directly abuts the second domain of the pair of affinity domains in the second chimeric polypeptide.

### Embodiment H212

[2680] The method of embodiment H210, wherein the second chimeric polypeptide further comprises a linker sequence between at least one of the one or more additional target-binding domains and the second domain of the pair of affinity domains in the second chimeric polypeptide.

### Embodiment H213

[2681] The method of embodiment H210, wherein at least one of the one or more additional target-binding domains directly abuts the second target-binding domain in the second chimeric polypeptide.

### Embodiment H214

[2682] The method of embodiment H210, wherein the second chimeric polypeptide further comprises a linker sequence between at least one of the one or more additional target-binding domains and the second target-binding domain in the second chimeric polypeptide.

### Embodiment H215

[2683] The method of any one of embodiments H196-H214, wherein two or more of the first target-binding domain, the second target-binding domain, and the one or more additional target-binding domains bind specifically to the same antigen.

### Embodiment H216

[2684] The method of embodiment H215, wherein two or more of the first target-binding domain, the second target-binding domain, and the one or more additional target-binding domains bind specifically to the same epitope.

### Embodiment H217

[2685] The method of embodiment H216, wherein two or more of the first target-binding domain, the second target-binding domain, and the one or more additional target-binding domains comprise the same amino acid sequence.

### Embodiment H218

[2686] The method of embodiment H215, wherein the first target-binding domain, the second target-binding domain, and the one or more additional target-binding domains each bind specifically to the same antigen.

### Embodiment H219

[2687] The method of embodiment H218, wherein the first target-binding domain, the second target-binding domain, and the one or more additional target-binding domains each bind specifically to the same epitope.

### Embodiment H220

[2688] The method of embodiment H219, wherein the first target-binding domain, the second target-binding domain, and the one or more additional target-binding domains each comprise the same amino acid sequence.

### Embodiment H221

[2689] The method of any one of embodiments H196-H214, wherein the first target-binding domain, the second target-binding domain, and the one or more additional target-binding domains bind specifically to different antigens.

### Embodiment H222

[2690] The method of any one of embodiments H196-H221, wherein one or more of the first target-binding domain, the second target-binding domain, and the one or more target-binding domains is an antigen-binding domain.

### Embodiment H223

[2691] The method of embodiment H222, wherein the first target-binding domain, the second target-binding domain, and the one or more additional target-binding domains are each an antigen-binding domain.

### Embodiment H224

[2692] The method of embodiment H223, wherein antigen-binding domain comprises a scFv.

### Embodiment H225

[2693] The method of any one of embodiments H196-H224, wherein one or more of the first target-binding domain, the second target-binding domain, and the one or more target-binding domains bind specifically to a target selected from the group consisting of: CD16a, CD33, CD20, CD19, CD22, CD123, PDL-1, TIGIT, PD-1, TIM3, CTLA4, MICA, MICB, IL-6, IL-8, TNFα, CD26, CD36, ULBP2, CD30, CD200, IGF-1R, MUC4AC, MUC5AC, Trop-2, CMET, EGFR, HER1, HER2, HER3, PSMA, CEA, B7H3, EPCAM, BCMA, P-cadherin, CEACAM5, a UL16-binding protein, HLA-DR, DLL4, TYRO3, AXL, MER, CD122, CD155, PDGF-DD, a ligand of TGF-β receptor II (TGF-βRII), a ligand of TGF-βRIII, a ligand of DNAM1, a ligand of NKp46, a ligand of NKp44, a ligand of NKG2D, a ligand of NKp30, a ligand for a scMHCI, a ligand for a scMHCII, a ligand for a scTCR, a receptor for PDGF-DD, a receptor for stem cell factor (SCF), a receptor for stem cell-like tyrosine kinase 3 ligand (FLT3L), a receptor for MICA, a receptor for MICB, a receptor for a ULP16-binding protein, a receptor for CD155, and a receptor for CD122.

### Embodiment H226

[2694] The method of any one of embodiments H196-H214, wherein one or more of the first target-binding domain, the second target-binding domain, and the one or more additional target-binding domains is a soluble interleukin or cytokine protein.

### Embodiment H227

[2695] The method of embodiment H226, wherein the soluble interleukin or cytokine protein is selected from the group consisting of: IL-1, IL-2, IL-3, IL-7, IL-8, IL-10, IL-12, IL-15, IL-17, IL-18, IL-21, PDGF-DD, and SCF.

### Embodiment H228

[2696] The method of any one of embodiments H196-H214, wherein one or more of the first target-binding domain, the second target-binding domain, and the one or more additional target-binding domains is a soluble interleukin or cytokine receptor.

### Embodiment H229

[2697] The method of embodiment H228, wherein the soluble receptor a soluble TGF-β receptor II (TGF-βRII) a soluble TGF-βRIII, a soluble receptor for TNFα, a soluble receptor for IL-4, or a soluble receptor for IL-10.

### Embodiment H230

[2698] The method of any one of embodiments H196-H229, wherein the soluble tissue factor domain is a soluble human tissue factor domain.

### Embodiment H231

[2699] The method of embodiment H230, wherein the soluble human tissue factor domain comprises a sequence that is at least 80% identical to SEQ ID NO: 93.

### Embodiment H232

[2700] The method of embodiment H231, wherein the soluble human tissue factor domain comprises a sequence that is at least 90% identical to SEQ ID NO: 93.

### Embodiment H233

[2701] The method of embodiment H232, wherein the soluble human tissue factor domain comprises a sequence that is at least 95% identical to SEQ ID NO: 93.

### Embodiment H234

[2702] The method of any one of embodiments H230-H233, wherein the soluble human tissue factor domain does not comprise one or more of:

[2703] a lysine at an amino acid position that corresponds to amino acid position 20 of mature wildtype human tissue factor protein;

[2704] an isoleucine at an amino acid position that corresponds to amino acid position 22 of mature wildtype human tissue factor protein;

[2705] a tryptophan at an amino acid position that corresponds to amino acid position 45 of mature wildtype human tissue factor protein;

[2706] an aspartic acid at an amino acid position that corresponds to amino acid position 58 of mature wildtype human tissue factor protein;

[2707] a tyrosine at an amino acid position that corresponds to amino acid position 94 of mature wildtype human tissue factor protein;

[2708] an arginine at an amino acid position that corresponds to amino acid position 135 of mature wildtype human tissue factor protein; and

[2709] a phenylalanine at an amino acid position that corresponds to amino acid position 140 of mature wildtype human tissue factor protein.

### Embodiment H235

[2710] The method of embodiment H234, wherein the soluble human tissue factor domain does not comprise any of:

[2711] a lysine at an amino acid position that corresponds to amino acid position 20 of mature wildtype human tissue factor protein;

[2712] an isoleucine at an amino acid position that corresponds to amino acid position 22 of mature wildtype human tissue factor protein;

[2713] a tryptophan at an amino acid position that corresponds to amino acid position 45 of mature wildtype human tissue factor protein;

[2714] an aspartic acid at an amino acid position that corresponds to amino acid position 58 of mature wildtype human tissue factor protein;

[2715] a tyrosine at an amino acid position that corresponds to amino acid position 94 of mature wildtype human tissue factor protein;

[2716] an arginine at an amino acid position that corresponds to amino acid position 135 of mature wildtype human tissue factor protein; and

[2717] a phenylalanine at an amino acid position that corresponds to amino acid position 140 of mature wildtype human tissue factor protein.

### Embodiment H236

[2718] The method of any one of embodiments H196-H235, wherein the soluble tissue factor domain is not capable of binding to Factor VIIa.

### Embodiment H237

[2719] The method of any one of embodiments H196-H236, wherein the soluble tissue factor domain does not convert inactive Factor X into Factor Xa.

### Embodiment H238

[2720] The method of any one of embodiments H196-H237, wherein the multi-chain chimeric polypeptide does not stimulate blood coagulation in a mammal.

### Embodiment H239

[2721] The method of any one of embodiments H196-H238, wherein the pair of affinity domains is a sushi domain from an alpha chain of human IL-15 receptor (IL-15Rα) and a soluble IL-15.

### Embodiment H240

[2722] The method of embodiment H239, wherein the soluble IL-15 has a D8N or D8A amino acid substitution.

### Embodiment H241

[2723] The method of embodiment H239 or H240, wherein the human IL-15Rα is a mature full-length IL-15Rα.

### Embodiment H242

[2724] The method of any one of embodiments H196-H238, wherein the pair of affinity domains is selected from the group consisting of: barnase and barnstar, a PKA and an AKAP, adapter/docking tag modules based on mutated RNase I fragments, and SNARE modules based on interactions of the proteins syntaxin, synaptotagmin, synaptobrevin, and SNAP25.

### Embodiment H243

[2725] The method of any one of embodiments H1-H19, H35-H42, H44-H62, and H64-H77, wherein at least one of the one or more NK cell activating agent(s) is a multi-chain chimeric polypeptide comprising:

[2726] (a) a first and second chimeric polypeptides, wherein each comprises:
[2727] (i) a first target-binding domain;
[2728] (ii) a Fc domain; and
[2729] (iii) a first domain of a pair of affinity domains;

[2730] (b) a third and fourth chimeric polypeptide, wherein each comprises:
[2731] (i) a second domain of a pair of affinity domains; and
[2732] (ii) a second target-binding domain,

[2733] wherein the first and second chimeric polypeptides and the third and fourth chimeric polypeptides associate through the binding of the first domain and the second domain of the pair of affinity domains, and the first and second chimeric polypeptides associate through their Fc domains.

### Embodiment H244

[2734] The method of embodiment H243, wherein the first target-binding domain and the Fc domain directly abut each other in the first and second chimeric polypeptides.

### Embodiment H245

[2735] The method of embodiment H243, wherein the first and second chimeric polypeptides further comprise a linker sequence between the first target-binding domain and the Fc domain in the first and second chimeric polypeptides.

### Embodiment H246

[2736] The method of any one of embodiments H243-H245, wherein the Fc domain and the first domain of the pair of affinity domains directly abut each other in the first and second chimeric polypeptides.

### Embodiment H247

[2737] The method of any one of embodiments H243-H245, wherein the first chimeric polypeptide further comprises a linker sequence between the Fc domain and the first domain of the pair of affinity domains in the first and second chimeric polypeptides.

### Embodiment H248

[2738] The method of any one of embodiments H243-H247, wherein the second domain of the pair of affinity domains and the second target-binding domain directly abut each other in the third and fourth chimeric polypeptides.

### Embodiment H249

[2739] The method of any one of embodiments H243-H247, wherein third and fourth chimeric polypeptides further comprise a linker sequence between the second domain of the pair of affinity domains and the second target-binding domain in the third and fourth chimeric polypeptides.

### Embodiment H250

[2740] The method of any one of embodiments H243-H249, wherein the first target-binding domain and the second target-binding domain bind specifically to the same antigen.

### Embodiment H251

[2741] The method of embodiment H250, wherein the first target-binding domain and the second target-binding domain bind specifically to the same epitope.

### Embodiment H252

[2742] The method of embodiment H251, wherein the first target-binding domain and the second target-binding domain comprise the same amino acid sequence.

### Embodiment H253

[2743] The method of any one of embodiments H243-H249, wherein the first target-binding domain and the second target-binding domain bind specifically to different antigens.

### Embodiment H254

[2744] The method of any one of embodiments H243-H253, wherein one or both of the first target-binding domain and the second target-binding domain is an antigen-binding domain.

### Embodiment H255

[2745] The method of embodiment H254, wherein the first target-binding domain and the second target-binding domain are each antigen-binding domains.

### Embodiment H256

[2746] The method of embodiment H254 or H255, wherein antigen-binding domain comprises a scFv or a single domain antibody.

### Embodiment H257

[2747] The method of any one of embodiments H243-H256, wherein one or both of the first target-binding domain and the second target-binding domain bind specifically to a target selected from the group consisting of: CD16a, CD33, CD20, CD19, CD22, CD123, PDL-1, TIGIT, PD-1, TIM3, CTLA4, MICA, MICB, IL-6, IL-8, TNFα, CD26, CD36, ULBP2, CD30, CD200, IGF-1R, MUC4AC, MUC5AC, Trop-2, CMET, EGFR, HER1, HER2, HER3, PSMA, CEA, B7H3, EPCAM, BCMA, P-cadherin, CEACAM5, a UL16-binding protein, HLA-DR, DLL4, TYRO3, AXL, MER, CD122, CD155, PDGF-DD, a ligand of TGF-β receptor II (TGF-βRII), a ligand of TGF-βRIII, a ligand of DNAM1, a ligand of NKp46, a ligand of NKp44, a ligand of NKG2D, a ligand of NKp30, a ligand for a scMHCI, a ligand for a scMHCII, a ligand for a scTCR, a receptor for PDGF-DD, a receptor for stem cell factor (SCF), a receptor for stem cell-like tyrosine kinase 3 ligand (FLT3L), a receptor for MICA, a receptor for MICB, a receptor for a ULP16-binding protein, a receptor for CD155, and a receptor for CD122.

### Embodiment H258

[2748] The method of any one of embodiments H243-H256, wherein one or both of the first target-binding domain and the second target-binding domain is a soluble interleukin or cytokine protein.

### Embodiment H259

[2749] The method of embodiment H258, wherein the soluble interleukin or cytokine protein is selected from the group consisting of: IL-1, IL-2, IL-3, IL-7, IL-8, IL-10, IL-12, IL-15, IL-17, IL-18, IL-21, PDGF-DD, and SCF.

### Embodiment H260

[2750] The method of any one of embodiments H243-H256, wherein one or both of the first target-binding domain and the second target-binding domain is a soluble interleukin or cytokine receptor.

### Embodiment H261

[2751] The method of embodiment H260, wherein the soluble receptor is a soluble TGF-β receptor II (TGF-βRII) a soluble TGF-βRIII, a soluble receptor for TNFα, a soluble receptor for IL-4, or a soluble receptor for IL-10.

The application's sequence listing, which the Patent Office published only in electronic form, follows.

SEQUENCE LISTING (334 sequences)

SEQ ID NO: 1 - protein, 251 aa, Homo sapiens
  source: /note="CD25"
ELCDDDPPEIPHATFKAMAYKEGTMLNCECKRGFRRIKSGSLYMLCTGNSSHSSWDNQCQCTSSATRNTTKQVTPQPEEQKERKTTEMQSPMQPVDQASLPGHCREPPPWENEATERIYHFVVGQMVYYQCVQGYRALHRGPAESVCKMTHGKTRWTQPQLICTGEMETSQFPGEEKPQASPEGRPESETSCLVTTTDFQIQTEMAATMETSIFTTEYQVAVAGCVFLLISVLLLSGLTWQRRQRKSRRTI

SEQ ID NO: 2 - DNA, 753 bp, Homo sapiens
  source: /note="CD25"
gagctctgtgacgatgacccgccagagatcccacacgccacattcaaagccatggcctacaaggaaggaaccatgttgaactgtgaatgcaagagaggtttccgcagaataaaaagcgggtcactctatatgctctgtacaggaaactctagccactcgtcctgggacaaccaatgtcaatgcacaagctctgccactcggaacacaacgaaacaagtgacacctcaacctgaagaacagaaagaaaggaaaaccacagaaatgcaaagtccaatgcagccagtggaccaagcgagccttccaggtcactgcagggaacctccaccatgggaaaatgaagccacagagagaatttatcatttcgtggtggggcagatggtttattatcagtgcgtccagggatacagggctctacacagaggtcctgctgagagcgtctgcaaaatgacccacgggaagacaaggtggacccagccccagctcatatgcacaggtgaaatggagaccagtcagtttccaggtgaagagaagcctcaggcaagccccgaaggccgtcctgagagtgagacttcctgcctcgtcacaacaacagattttcaaatacagacagaaatggctgcaaccatggagacgtccatatttacaacagagtaccaggtagcagtggccggctgtgttttcctgctgatcagcgtcctcctcctgagtgggctcacctggcagcggagacagaggaagagtagaagaacaatc

SEQ ID NO: 3 - protein, 199 aa, Homo sapiens
  source: /note="CD69"
MSSENCFVAENSSLHPESGQENDATSPHFSTRHEGSFQVPVLCAVMNVVFITILIIALIALSVGQYNCPGQYTFSMPSDSHVSSCSEDWVGYQRKCYFISTVKRSWTSAQNACSEHGATLAVIDSEKDMNFLKRYAGREEHWVGLKKEPGHPWKWSNGKEFNNWFNVTGSDKCVFLKNTEVSSMECEKNLYWICNKPYK

SEQ ID NO: 4 - DNA, 600 bp, Homo sapiens
  source: /note="CD69"
atgagctctgaaaattgtttcgtagcagagaacagctctttgcatccggagagtggacaagaaaatgatgccaccagtccccatttctcaacacgtcatgaagggtccttccaagttcctgtcctgtgtgctgtaatgaatgtggtcttcatcaccattttaatcatagctctcattgccttatcagtgggccaatacaattgtccaggccaatacacattctcaatgccatcagacagccatgtttcttcatgctctgaggactgggttggctaccagaggaaatgctactttatttctactgtgaagaggagctggacttcagcccaaaatgcttgttctgaacatggtgctactcttgctgtcattgattctgaaaaggacatgaactttctaaaacgatacgcaggtagagaggaacactgggttggactgaaaaaggaacctggtcacccatggaagtggtcaaatggcaaagaatttaacaactggttcaacgttacagggtctgacaagtgtgtttttctgaaaaacacagaggtcagcagcatggaatgtgagaagaatttatactggatatgtaacaaaccttacaaataa

SEQ ID NO: 5 - protein, 77 aa, Homo sapiens
  source: /note="CD59"
LQCYNCPNPTADCKTAVNCSSDFDACLITKAGLQVYNKCWKFEHCNFNDVTTRLRENELTYYCCKKDLCNFNEQLEN

SEQ ID NO: 6 - DNA, 387 bp, Homo sapiens
  source: /note="CD59"
atgggaatccaaggagggtctgtcctgttcgggctgctgctcgtcctggctgtcttctgccattcaggtcatagcctgcagtgctacaactgtcctaacccaactgctgactgcaaaacagccgtcaattgttcatctgattttgatgcgtgtctcattaccaaagctgggttacaagtgtataacaagtgttggaagtttgagcattgcaatttcaacgacgtcacaacccgcttgagggaaaatgagctaacgtactactgctgcaagaaggacctgtgtaactttaacgaacagcttgaaaatggtgggacatccttatcagagaaaacagttcttctgctggtgactccatttctggcagcagcctggagccttcatccctaa

SEQ ID NO: 7 - protein, 311 aa, Homo sapiens
  source: /note="CD352"
QSSLTPLMVNGILGESVTLPLEFPAGEKVNFITWLFNETSLAFIVPHETKSPEIHVTNPKQGKRLNFTQSYSLQLSNLKMEDTGSYRAQISTKTSAKLSSYTLRILRQLRNIQVTNHSQLFQNMTCELHLTCSVEDADDNVSFRWEALGNTLSSQPNLTVSWDPRISSEQDYTCIAENAVSNLSFSVSAQKLCEDVKIQYTDTKMILFMVSGICIVFGFIILLLLVLRKRRDSLSLSTQRTQGPAESARNLEYVSVSPTNNTVYASVTHSNRETEIWTPRENDTITIYSTINHSKESKPTFSRATALDNVV

SEQ ID NO: 8 - DNA, 996 bp, Homo sapiens
  source: /note="CD59"
atgttgtggctgttccaatcgctcctgtttgtcttctgctttggcccagggaatgtagtttcacaaagcagcttaaccccattgatggtgaacgggattctgggggagtcagtaactcttcccctggagtttcctgcaggagagaaggtcaacttcatcacttggcttttcaatgaaacatctcttgccttcatagtaccccatgaaaccaaaagtccagaaatccacgtgactaatccgaaacagggaaagcgactgaacttcacccagtcctactccctgcaactcagcaacctgaagatggaagacacaggctcttacagagcccagatatccacaaagacctctgcaaagctgtccagttacactctgaggatattaagacaactgaggaacatacaagttaccaatcacagtcagctatttcagaatatgacctgtgagctccatctgacttgctctgtggaggatgcagatgacaatgtctcattcagatgggaggccttgggaaacacactttcaagtcagccaaacctcactgtctcctgggaccccaggatttccagtgaacaggactacacctgcatagcagagaatgctgtcagtaatttatccttctctgtctctgcccagaagctttgcgaagatgttaaaattcaatatacagataccaaaatgattctgtttatggtttctgggatatgcatagtcttcggtttcatcatactgctgttacttgttttgaggaaaagaagagattccctatctttgtctactcagcgaacacagggccccgagtccgcaaggaacctagagtatgtttcagtgtctccaacgaacaacactgtgtatgcttcagtcactcattcaaacagggaaacagaaatctggacacctagagaaaatgatactatcacaatttactccacaattaatcattccaaagagagtaaacccactttttccagggcaactgcccttgacaatgtcgtgtaa

SEQ ID NO: 9 - protein, 231 aa, Homo sapiens
  source: /note="NKp80"
MQDEERYMTLNVQSKKRSSAQTSQLTFKDYSVTLHWYKILLGISGTVNGILTLTLISLILLVSQGVLLKCQKGSCSNATQYEDTGDLKVNNGTRRNISNKDLCASRSADQTVLCQSEWLKYQGKCYWFSNEMKSWSDSYVYCLERKSHLLIIHDQLEMAFIQKNLRQLNYVWIGLNFTSLKMTWTWVDGSPIDSKIFFIKGPAKENSCAAIKESKIFSETCSSVFKWICQY

SEQ ID NO: 10 - DNA, 546 bp, Homo sapiens
  source: /note="Npk80"
atgcaagatgaagaaagatacatgacattgaatgtacagtcaaagaaaaggagttctgcccaaacatctcaacttacatttaaagattattcagtgacgttgcactggtataaaatcttactgggaatatctggaaccgtgaatggtattctcactttgactttgatctccttgatcctgttggtactatgccaatcagaatggctcaaataccaagggaagtgttattggttctctaatgagatgaaaagctggagtgacagttatgtgtattgtttggaaagaaaatctcatctactaatcatacatgaccaacttgaaatggcttttatacagaaaaacctaagacaattaaactacgtatggattgggcttaactttacctccttgaaaatgacatggacttgggtggatggttctccaatagattcaaagatattcttcataaagggaccagctaaagaaaacagctgtgctgccattaaggaaagcaaaattttctctgaaacctgcagcagtgttttcaaatggatttgtcagtattag

SEQ ID NO: 11 - protein, 318 aa, Homo sapiens
  source: /note="DNAM-1"
EEVLWHTSVPFAENMSLECVYPSMGILTQVEWFKIGTQQDSIAIFSPTHGMVIRKPYAERVYFLNSTMASNNMTLFFRNASEDDVGYYSCSLYTYPQGTWQKVIQVVQSDSFEAAVPSNSHIVSEPGKNVTLTCQPQMTWPVQAVRWEKIQPRQIDLLTYCNLVHGRNFTSKFPRQIVSNCSHGRWSVIVIPDVTVSDSGLYRCYLQASAGENETFVMRLTVAEGKTDNQYTLFVAGGTVLLLLFVISITTIIVIFLNRRRRRERRDLFTESWDTQKAPNNYRSPISTSQPTNQSMDDTREDIYVNYPTFSRRPKTRV

SEQ ID NO: 12 - DNA, 1011 bp, Homo sapiens
  source: /note="DNAM-1"
atggattatcctactttacttttggctcttcttcatgtatacagagctctatgtgaagaggtgctttggcatacatcagttccctttgccgagaacatgtctctagaatgtgtgtatccatcaatgggcatcttaacacaggtggagtggttcaagatcgggacccagcaggattccatagccattttcagccctactcatggcatggtcataaggaagccctatgctgagagggtttactttttgaattcaacgatggcttccaataacatgactcttttctttcggaatgcctctgaagatgatgttggctactattcctgctctctttacacttacccacagggaacttggcagaaggtgatacaggtggttcagtcagatagttttgaggcagctgtgccatcaaatagccacattgtttcggaacctggaaagaatgtcacactcacttgtcagcctcagatgacgtggcctgtgcaggcagtgaggtgggaaaagatccagccccgtcagatcgacctcttaacttactgcaacttggtccatggcagaaatttcacctccaagttcccaagacaaatagtgagcaactgcagccacggaaggtggagcgtcatcgtcatccccgatgtcacagtctcagactcggggctttaccgctgctacttgcaggccagcgcaggagaaaacgaaaccttcgtgatgagattgactgtagccgagggtaaaaccgataaccaatataccctctttgtggctggagggacagttttattgttgttgtttgttatctcaattaccaccatcattgtcattttccttaacagaaggagaaggagagagagaagagatctatttacagagtcctgggatacacagaaggcacccaataactatagaagtcccatctctaccagtcaacctaccaatcaatccatggatgatacaagagaggatatttatgtcaactatccaaccttctctcgcagaccaaagactagagtttaa

SEQ ID NO: 13 - protein, 347 aa, Homo sapiens
  source: /note="HB4"
GKGCQGSADHVVSISGVPLQLQPNSIQTKVDSIAWKKLLPSQNGFHHILKWENGSLPSNTSNDRFSFIVKNLSLLIKAAQQQDSGLYCLEVTSISGKVQTATFQVFVFDKVEKPRLQGQGKILDRGRCQVALSCLVSRDGNVSYAWYRGSKLIQTAGNLTYLDEEVDINGTHTYTCNVSNPVSWESHTLNLTQDCQNAHQEFRFWPFLVIIVILSALFLGTLACFCVWRRKRKEKQSETSPKEFLTIYEDVKDLKTRRNHEQEQTFPGGGSTIYSMIQSQSSAPTSQEPAYTLYSLIQPSRKSGSRKRNHSPSFNSTIYEVIGKSQPKAQNPARLSRKELENFDVYS

SEQ ID NO: 14 - DNA, 1098 bp, Homo sapiens
  source: /note="HB4"
atgctggggcaagtggtcaccctcatactcctcctgctcctcaaggtgtatcagggcaaaggatgccagggatcagctgaccatgtggttagcatctcgggagtgcctcttcagttacaaccaaacagcatacagacgaaggttgacagcattgcatggaagaagttgctgccctcacaaaatggatttcatcacatattgaagtgggagaatggctctttgccttccaatacttccaatgatagattcagttttatagtcaagaacttgagtcttctcatcaaggcagctcagcagcaggacagtggcctctactgcctggaggtcaccagtatatctggaaaagttcagacagccacgttccaggtttttgtatttgataaagttgagaaaccccgcctacaggggcaggggaagatcctggacagagggagatgccaagtggctctgtcttgcttggtctccagggatggcaatgtgtcctatgcttggtacagagggagcaagctgatccagacagcagggaacctcacctacctggacgaggaggttgacattaatggcactcacacatatacctgcaatgtcagcaatcctgttagctgggaaagccacaccctgaatctcactcaggactgtcagaatgcccatcaggaattcagattttggccgtttttggtgatcatcgtgattctaagcgcactgttccttggcacccttgcctgcttctgtgtgtggaggagaaagaggaaggagaagcagtcagagaccagtcccaaggaatttttgacaatttacgaagatgtcaaggatctgaaaaccaggagaaatcacgagcaggagcagacttttcctggaggggggagcaccatctactctatgatccagtcccagtcttctgctcccacgtcacaagaacctgcatatacattatattcattaattcagccttccaggaagtctggatccaggaagaggaaccacagcccttccttcaatagcactatctatgaagtgattggaaagagtcaacctaaagcccagaaccctgctcgattgagccgcaaagagctggagaactttgatgtttattcctag

SEQ ID NO: 15 - protein, 183 aa, Homo sapiens
  source: /note="NK-p30"
LWVSQPPEIRTLEGSSAFLPCSFNASQGRLAIGSVTWFRDEVVPGKEVRNGTPEFRGRLAPLASSRFLHDHQAELHIRDVRGHDASIYVCRVEVLGLGVGTGNGTRLVVEKEHPQLGAGTVLLLRAGFYAVSFLSVAVGSTVYYQGKCLTWKGPRRQLPAVVPAPLPPPCGSSAHLLPPVPGG

SEQ ID NO: 16 - DNA, 573 bp, Homo sapiens
  source: /note="NKp30"
atggcctggatgctgttgctcatcttgatcatggtccatccaggatcctgtgctctctgggtgtcccagccccctgagattcgtaccctggaaggatcctctgccttcctgccctgctccttcaatgccagccaagggagactggccattggctccgtcacgtggttccgagatgaggtggttccagggaaggaggtgaggaatggaaccccagagttcaggggccgcctggccccacttgcttcttcccgtttcctccatgaccaccaggctgagctgcacatccgggacgtgcgaggccatgacgccagcatctacgtgtgcagagtggaggtgctgggccttggtgtcgggacagggaatgggactcggctggtggtggagaaagaacatcctcagctaggggctggtacagtcctcctccttcgggctggattctatgctgtcagctttctctctgtggccgtgggcagcaccgtctattaccagggcaaatgccactgtcacatgggaacacactgccactcctcagatgggccccgaggagtgattccagagcccagatgtccctag

SEQ ID NO: 17 - protein, 255 aa, Homo sapiens
  source: /note="NKp44"
QSKAQVLQSVAGQTLTVRCQYPPTGSLYEKKGWCKEASALVCIRLVTSSKPRTMAWTSRFTIWDDPDAGFFTVTMTDLREEDSGHYWCRIYRPSDNSVSKSVRFYLVVSPASASTQTSWTPRDLVSSQTQTQSCVPPTAGARQAPESPSTIPVPSQPQNSTLRPGPAAPIALVPVFCGLLVAKSLVLSALLVWWGDIWWKTMMELRSLDTQKATCHLQQVTDLPWTSVSSPVEREILYHTVARTKISDDDDEHTL

SEQ ID NO: 18 - DNA, 777 bp, Homo sapiens
  source: /note="NKp44"
atggcctggcgagccctacacccactgctactgctgctgctgctgttcccaggctctcaggcacaatccaaggctcaggtacttcaaagtgtggcagggcagacgctaaccgtgagatgccagtacccgcccacgggcagtctctacgagaagaaaggctggtgtaaggaggcttcagcacttgtgtgcatcaggttagtcaccagctccaagcccaggacgatggcttggacctctcgattcacaatctgggacgaccctgatgctggcttcttcactgtcaccatgactgatctgagagaggaagactcaggacattactggtgtagaatctaccgcccttctgacaactctgtctctaagtccgtcagattctatctggtggtatctccagcctctgcctccacacagacctcctggactccccgcgacctggtctcttcacagacccagacccagagctgtgtgcctcccactgcaggagccagacaagcccctgagtctccatctaccatccctgtcccttcacagccacagaactccacgctccgccctggccctgcagcccccattgccctggtgcctgtgttctgtggactcctcgtagccaagagcctggtgctgtcagccctgctcgtctggtgggttttaaggaatcggcacatgcagcatcaagggaggtctctgctgcacccagctcagcccaggccccaggcccatagacacttcccactgagccacagggcaccaggggggacatatggtggaaaaccatga

SEQ ID NO: 19 - protein, 283 aa, Homo sapiens
  source: /note="NKp46"
QQQTLPKPFIWAEPHFMVPKEKQVTICCQGNYGAVEYQLHFEGSLFAVDRPKPPERINKVQFYIPDMNSRMAGQYSCIYRVGELWSEPSNLLDLVVTEMYDTPTLSVHPGPEVISGEKVTFYCRLDTATSMFLLLKEGRSSHVQRGYGKVQAEFPLGPVTTAHRGTYRCFGSYNNHAWSFPSEPVKLLVTGDIENTSLAPEDPTFPADTWGTYLLTTETGLQKDHALWDHTAQNLLRMGLAFLVLVALVWFLVEDWLSRKRTRERASRASTWEGRRRLNTQTL

SEQ ID NO: 20 - DNA, 777 bp, Homo sapiens; identical to SEQ ID NO: 18
  source: /note="NKp46"

SEQ ID NO: 21 - protein, 216 aa, Homo sapiens
  source: /note="NKG2D"
MGWIRGRRSRHSWEMSEFHNYNLDLKKSDFSTRWQKQRCPVVKSKCRENASPFFFCCFIAVAMGIRFIIMVAIWSAVFLNSLFNQEVQIPLTESYCGPCPKNWICYKNNCYQFFDESKNWYESQASCMSQNASLLKVYSKEDQDLLKLVKSYHWMGLVHIPTNGSWQWEDGSILSPNLLTIIEMQKGDCALYASSFKGYIENCSTPNTYICMQRTV

SEQ ID NO: 22 - DNA, 651 bp, Homo sapiens
  source: /note="NKG2D"
atggggtggattcgtggtcggaggtctcgacacagctgggagatgagtgaatttcataattataacttggatctgaagaagagtgatttttcaacacgatggcaaaagcaaagatgtccagtagtcaaaagcaaatgtagagaaaatgcatctccattttttttctgctgcttcatcgctgtagccatgggaatccgtttcattattatggtaacaatatggagtgctgtattcctaaactcattattcaaccaagaagttcaaattcccttgaccgaaagttactgtggcccatgtcctaaaaactggatatgttacaaaaataactgctaccaattttttgatgagagtaaaaactggtatgagagccaggcttcttgtatgtctcaaaatgccagccttctgaaagtatacagcaaagaggaccaggatttacttaaactggtgaagtcatatcattggatgggactagtacacattccaacaaatggatcttggcagtgggaagatggctccattctctcacccaacctactaacaataattgaaatgcagaagggagactgtgcactctatgcctcgagctttaaaggctatatagaaaactgttcaactccaaatacgtacatctgcatgcaaaggactgtgtaa

SEQ ID NO: 23 - protein, 359 aa, Homo sapiens
  source: /note="CD16"
MAEGTLWQILCVSSDAQPQTFEGVKGADPPTLPPGSFLPGPVLWWGSLARLQTEKSDEVSRKGNWWVTEMGGGAGERLFTSSCLVGLVPLGLRISLVTCPLQCGIMWQLLLPTALLLLVSAGMRTEDLPKAVVFLEPQWYRVLEKDSVTLKCQGAYSPEDNSTQWFHNESLISSQASSYFIDAATVDDSGEYRCQTNLSTLSDPVQLEVHIGWLLLQAPRWVFKEEDPIHLRCHSWKNTALHKVTYLQNGKGRKYFHHNSDFYIPKATLKDSGSYFCRGLFGSKNVSSETVNITITQGLAVSTISSFFPPGYQVSFCLVMVLLFAVDTGLYFSVKTNIRSSTRDWKDHKFKWRKDPQDK

SEQ ID NO: 24 - DNA, 1080 bp, Homo sapiens
  source: /note="CD16"
atggctgagggcacactctggcagattctgtgtgtgtcctcagatgctcagccacagacctttgagggagtaaagggggcagacccacccaccttgcctccaggctctttccttcctggtcctgttctatggtggggctcccttgccagacttcagactgagaagtcagatgaagtttcaagaaaaggaaattggtgggtgacagagatgggtggaggggctggggaaaggctgtttacttcctcctgtctagtcggtttggtccctttagggctccggatatctttggtgacttgtccactccagtgtggcatcatgtggcagctgctcctcccaactgctctgctacttctagtttcagctggcatgcggactgaagatctcccaaaggctgtggtgttcctggagcctcaatggtacagggtgctcgagaaggacagtgtgactctgaagtgccagggagcctactcccctgaggacaattccacacagtggtttcacaatgagagcctcatctcaagccaggcctcgagctacttcattgacgctgccacagtcgacgacagtggagagtacaggtgccagacaaacctctccaccctcagtgacccggtgcagctagaagtccatatcggctggctgttgctccaggcccctcggtgggtgttcaaggaggaagaccctattcacctgaggtgtcacagctggaagaacactgctctgcataaggtcacatatttacagaatggcaaaggcaggaagtattttcatcataattctgacttctacattccaaaagccacactcaaagacagcggctcctacttctgcagggggctttttgggagtaaaaatgtgtcttcagagactgtgaacatcaccatcactcaaggtttggcagtgtcaaccatctcatcattctttccacctgggtaccaagtctctttctgcttggtgatggtactcctttttgcagtggacacaggactatatttctctgtgaagacaaacattcgaagctcaacaagagactggaaggaccataaatttaaatggagaaaggaccctcaagacaaatga

SEQ ID NO: 25 - protein, 233 aa, Homo sapiens
  source: /note="CD16"
MWQLLLPTALLLLVSAGMRTEDLPKAVVFLEPQWYSVLEKDSVTLKCQGAYSPEDNSTQWFHNESLISSQASSYFIDAATVNDSGEYRCQTNLSTLSDPVQLEVHIGWLLLQAPRWVFKEEDPIHLRCHSWKNTALHKVTYLQNGKDRKYFHHNSDFHIPKATLKDSGSYFCRGLVGSKNVSSETVNITITQGLAVSTISSFSPPGYQVSFCLVMVLLFAVDTGLYFSVKTNI

SEQ ID NO: 26 - DNA, 702 bp, Homo sapiens
  source: /note="CD16"
atgtggcagctgctcctcccaactgctctgctacttctagtttcagctggcatgcggactgaagatctcccaaaggctgtggtgttcctggagcctcaatggtacagcgtgcttgagaaggacagtgtgactctgaagtgccagggagcctactcccctgaggacaattccacacagtggtttcacaatgagaacctcatctcaagccaggcctcgagctacttcattgacgctgccacagtcaacgacagtggagagtacaggtgccagacaaacctctccaccctcagtgacccggtgcagctagaagtccatatcggctggctgttgctccaggcccctcggtgggtgttcaaggaggaagaccctattcacctgaggtgtcacagctggaagaacactgctctgcataaggtcacatatttacagaatggcaaagacaggaagtattttcatcataattctgacttccacattccaaaagccacactcaaagatagcggctcctacttctgcagggggcttgttgggagtaaaaatgtgtcttcagagactgtgaacatcaccatcactcaaggtttggcagtgtcaaccatctcatcattctctccacctgggtaccaagtctctttctgcttggtgatggtactcctttttgcagtggacacaggactatatttctctgtgaagacaaacatttga

SEQ ID NO: 27 - protein, 304 aa, Homo sapiens [sequence omitted]

SEQ ID NO: 28 - DNA, 915 bp, Homo sapiens
  source: /note="KIR2DS1"
atgtcgctcacggtcgtcagcatggcgtgtgttgggttcttcttgctgcagggggcctggccacatgagggagtccacagaaaaccttccctcctggcccacccaggtcgcctggtgaaatcagaagagacagtcatcctgcaatgttggtcagatgtcatgtttgaacacttccttctgcacagagaggggatgtttaacgacactttgcgcctcattggagaacaccatgatggggtctccaaggccaacttctccatcagtcgcatgaagcaagacctggcagggacctacagatgctacggttctgttactcactccccctatcagttgtcagctcccagtgaccctctggacatcgtgatcataggtctatatgagaaaccttctctctcagcccagccgggccccacggttctggcaggagagaatgtgaccttgtcctgcagctcccggagctcctatgacatgtaccatctatccagggaaggggaggcccatgaacgtaggctccctgcagggaccaaggtcaacggaacattccaggccaactttcctctgggccctgccacccatggagggacctacagatgcttcggctctttccgtgactctccatacgagtggtcaaagtcaagtgacccactgcttgtttctgtcacaggaaacccttcaaatagttggccttcacccactgaaccaagctccgaaaccggtaaccccagacacctacatgttctgattgggacctcagtggtcaaaatccctttcaccatcctcctcttctttctccttcatcgctggtgctccgacaaaaaaaatgctgctgtaatggaccaagagcctgcagggaacagaacagtgaacagcgaggattctgatgaacaagaccatcaggaggtgtcatacgcataa

SEQ ID NO: 29 - protein, 304 aa, Homo sapiens [sequence omitted]

SEQ ID NO: 30 - DNA, 1026 bp, Homo sapiens
  source: /note="KIR2DS2"
atgtcgctcatggtcgtcagcatggcgtgtgttgggttcttcttgctgcagggggcctggccacatgagggagtccacagaaaaccttccctcctggcccacccaggtcccctggtgaaatcagaagagacagtcatcctgcaatgttggtcagatgtcaggtttgagcacttccttctgcacagagaggggaagtataaggacactttgcacctcattggagagcaccatgatggggtctccaaggccaacttctccatcggtcccatgatgcaagaccttgcagggacctacagatgctacggttctgttactcactccccctatcagttgtcagctcccagtgaccctctggacatcgtcatcacaggtctatatgagaaaccttctctctcagcccagccgggccccacggttttggcaggagagagcgtgaccttgtcctgcagctcccggagctcctatgacatgtaccatctatccagggagggggaggcccatgaacgtaggttctctgcagggcccaaggtcaacggaacattccaggccgactttcctctgggccctgccacccacggaggaacctacagatgcttcggctctttccgtgactctccctatgagtggtcaaactcgagtgacccactgcttgtttctgtcacaggaaacccttcaaatagttggccttcacccactgaaccaagctccaaaaccggtaaccccagacacctgcatgttctgattgggacctcagtggtcaaaatccctttcaccatcctcctcttctttctccttcatcgctggtgctccaacaaaaaaaatgctgctgtaatggaccaagagcctgcagggaacagaacagtgaacagcgaggactctgatgaacaagaccctcaggaggtgacatacacacagttgaatcactgcgttttcacacagagaaaaatcactcgcccttctcagaggcccaagacacccccaacagatatcatcgtgtacacggaacttccaaatgctgagtccaga

SEQ ID NO: 31 - protein, 304 aa, Homo sapiens
  source: /note="KIR2DS3"
MSLMVISMACVGFFWLQGAWPHEGFRRKPSLLAHPGRLVKSEETVILQCWSDVMFEHFLLHREGTFNDTLRLIGEHIDGVSKANFSIGRMRQDLAGTYRCYGSVPHSPYQFSAPSDPLDIVITGLYEKPSLSAQPGPTVLAGESVTLSCSSWSSYDMYHLSTEGEAHERRFSAGPKVNGTFQADFPLGPATQGGTYRCFGSFHDSPYEWSKSSDPLLVSVTGNPSNSWPSPTEPSSKTGNPRHLHVLIGTSVVKLPFTILLFFLLHRWCSDKKNASVMDQGPAGNRTVNREDSDEQDHQEVSYA

SEQ ID NO: 32 - DNA, 915 bp, Homo sapiens
  source: /note="KIR2DS3"
atgtcgctcatggtcatcagcatggcatgtgttgggttcttctggctgcagggggcctggccacatgagggattccgcagaaaaccttccctcctggcccacccaggtcgcctggtgaaatcagaagagacagtcatcctgcaatgttggtcagatgtcatgtttgagcacttccttctgcacagagaggggacgtttaacgacactttgcgcctcattggagagcacattgatggggtctccaaggccaacttctccatcggtcgcatgaggcaagacctggcagggacctacagatgctacggttctgttcctcactccccctatcagttttcagctcccagtgaccctctggacatcgtgatcacaggtctatatgagaaaccttctctctcagcccagccgggccccacggttctggcaggagagagcgtgaccttgtcctgcagctcctggagctcctatgacatgtaccatctatccacggagggggaggcccatgaacgtaggttctctgcagggcccaaggtcaacggaacattccaggccgactttcctctgggccctgccacccaaggaggaacctacagatgcttcggctctttccatgactctccctacgagtggtcaaagtcaagtgacccactgcttgtttctgtcacaggaaacccttcaaatagttggccttcacccactgaaccaagctccaaaaccggtaaccccagacacctacacgttctgattgggacctcagtggtcaaactccctttcaccatcctcctcttctttctccttcatcgctggtgctccgacaaaaaaaatgcatctgtaatggaccaagggcctgcggggaacagaacagtgaacagggaggattctgatgaacaggaccatcaggaggtgtcatacgcataa

SEQ ID NO: 33 - protein, 354 aa, Homo sapiens
  source: /note="KIR2DL4"
HVGGQDKPFCSAWPSAVVPQGGHATLRCHCRRGFNIFTLYKKDGVPVPELYNRIFWNSFLISPVTPAHAGTYRCRGFHPHSPTEWSAPSNPLVIMVTGLYEKPSLTARPGPTVRAGENVTLSCSSQSSFDIYHLSREGEAHELRLPAVPSINGTFQADFPLGPATHGETYRCFGSFHGSPYEWSDPSDPLPVSVTGNPSSSWPSPTEPSFKTGIARHLHAVIRYSVAIILFTILPFFLLHRWCSKKKNAAVMNQEPAGHRTVNREDSDEQDPQEVTYAQLDHCIFTQRKITGPSQRSKRPSTDTSVCIELPNAEPRALSPAHEHHSQALMGSSRETTALSQTQLASSNVPAAGI

SEQ ID NO: 34 - DNA, 1251 bp, Homo sapiens
  source: /note="KIR2DL4"
atgtccccttcacatgttgtggtcaatgtgtcaactgcacgatccgggcccctcaccacatcctctgcaccggtcagtcgagccgagtcactgcgtcctggcagcagaagctgcaccatgtccatgtcacccacggtcatcatcctggcatgtcttgggttcttcttggaccagagtgtgtgggcacacgtgggtggtcaggacaagcccttctgctctgcctggcccagcgctgtggtgcctcaaggaggacacgtgactcttcggtgtcactatcgtcgtgggtttaacatcttcacgctgtacaagaaagatggggtccctgtccctgagctctacaacagaatattctggaacagtttcctcattagccctgtgaccccagcacacgcagggacctacagatgtcgaggttttcacccgcactcccccactgagtggtcggcacccagcaaccccctggtgatcatggtcacaggtctatatgagaaaccttcgcttacagcccggccgggccccacggttcgcgcaggagagaacgtgaccttgtcctgcagctcccagagctcctttgacatctaccatctatccagggagggggaagcccatgaacttaggctccctgcagtgcccagcatcaatggaacattccaggccgacttccctctgggtcctgccacccacggagagacctacagatgcttcggctctttccatggatctccctacgagtggtcagacccgagtgacccactgcctgtttctgtcacaggaaacccttctagtagttggccttcacccactgaaccaagcttcaaaactggtatcgccagacacctgcatgctgtgattaggtactcagtggccatcatcctctttaccatccttcccttctttctccttcatcgctggtgctccaaaaaaaaagatgctgctgtaatgaaccaagagcctgcgggacacagaacagtgaacagggaggactctgatgaacaagaccctcaggaggtgacatacgcacagttggatcactgcattttcacacagagaaaaatcactggcccttctcagaggagcaagagaccctcaacagataccagcgtgtgtatagaacttccaaatgctgagcccagagcgttgtctcctgcccatgagcaccacagtcaggccttgatgggatcttctagggagacaacagccctgtctcaaacccagcttgccagctctaatgtaccagcagctggaatctga

SEQ ID NO: 35 - protein, 218 aa, Homo sapiens
  source: /note="KIR2DS4"
QEGVHRKPSFLALPGHLVKSEETVILQCWSDVMFEHFLLHREGKFNNTLHLIGEHHDGVSKANFSIGPMMPVLAGTYRCYSSVPHSPYQLSAPSDPLDMVIIGLYEKPSLSAQPGPTVQAGENVSLSCSSIYPGRGRPMNVGSLQCAASTEHSRPTFLWALPPTEGPTDASALSVTLPTSGQTRVIHCLFPSQETLQIVGLHPLNQAPKPVTPDTYMF

SEQ ID NO: 36 - DNA, 893 bp, Homo sapiens
  source: /note="KIR2DS4"
atgtcgctcatggtcatcatcatggcgtgtgttgggttcttcttgctgcagggggcctggccacaggagggagtccacagaaaaccttccttcctggccctcccaggtcacctggtgaaatcagaagagacagtcatcctgcaatgttggtcggatgtcatgtttgagcacttccttctgcacagagaggggaagtttaacaacactttgcacctcattggagagcaccatgatggggtttccaaggccaacttctccattggtcccatgatgcctgtccttgcaggaacctacagatgctacggttctgttcctcactccccctatcagttgtcagctcccagtgaccctctggacatggtgatcataggtctatatgagaaaccttctctctcagcccagccgggccccacggttcaggcaggagagaatgtgaccttgtcctgcagctccatctatccagggaaggggaggcccatgaacgtaggctccctgcagtgcgcagcatcaacggaacattccaggccgactttcctctgggccctgccacccacggagggacctacagatgcttcggctctttccgtgacgctccctacgagtggtcaaactcgagtgatccactgcttgtttccgtcacaggaaacccttcaaatagttggccttcacccactgaaccaagctccaaaaccggtaaccccagacacctacatgttctgattgggacctcagtggtcaaaatccctttcaccatcctcctcttctttctccttcatcgctggtgctccgacaaaaaaaatgctgctgtaatggaccaagagcctgcagggaacagaacagtgaacagcgaggattctgatgaacaagaccatcaggaggtgtcatacgcataa

SEQ ID NO: 37 - protein, 283 aa, Homo sapiens
  source: /note="KIR2DS5"
HEGFRRKPSLLAHPGPLVKSEETVILQCWSDVMFEHFLLHREGTFNHTLRLIGEHIDGVSKGNFSIGRMTQDLAGTYRCYGSVTHSPYQLSAPSDPLDIVITGLYEKPSLSAQPGPTVLAGESVTLSCSSRSSYDMYHLSREGEAHERRLPAGTKVNGTFQADFPLDPATHGGTYRCFGSFRDSPYEWSKSSDPLLVSVTGNTSNSWPSPTEPSSKTGNPRHLHVLIGTSVVKLPFTILLFFLLHRWCSNKKNASVMDQGPAGNRTVNREDSDEQDHQEVSYA

SEQ ID NO: 38 - DNA, 915 bp, Homo sapiens
  source: /note="KIR2DS"
atgtcgctcatggtcatcagcatggcgtgtgttgcgttcttcttgctgcagggggcctggccacatgagggattccgcagaaaaccttccctcctggcccacccaggtcccctggtgaaatcagaagagacagtcatcctgcaatgttggtcagatgtcatgtttgagcacttccttctgcacagagaggggacgtttaaccacactttgcgcctcattggagagcacattgatggggtctccaagggcaacttctccatcggtcgcatgacacaagacctggcagggacctacagatgctacggttctgttactcactccccctatcagttgtcagcgcccagtgaccctctggacatcgtgatcacaggtctatatgagaaaccttctctctcagcccagccgggccccacggttctggcaggagagagcgtgaccttgtcctgcagctcccggagctcctatgacatgtaccatctatccagggaaggggaggcccatgaacgtaggctccctgcagggcccaaggtcaacagaacattccaggccgactttcctctggaccctgccacccacggagggacctacagatgcttcggctctttccgtgactctccatacgagtggtcaaagtcaagtgacccactgcttgtttctgtcacaggaaactcttcaaatagttggccttcacccactgaaccaagctccgaaaccggtaaccccagacacctacacgttctgattgggacctcagtggtcaaactccctttcaccatcctcctcttctttctccttcatcgctggtgctccaacaaaaaaaatgcatctgtaatggaccaagggcctgcggggaacagaacagtgaacagggaggattctgatgaacaggaccatcaggaggtgtcatacgcataa

SEQ ID NO: 39 - protein, 361 aa, Homo sapiens
  source: /note="KIR3DS1"
HMGGQDKPFLSAWPSAVVPRGGHVTLRCHYRHRFNNFMLYKEDRIHVPIFHGRIFQEGFNMSPVTTAHAGNYTCRGSHPHSPTGWSAPSNPMVIMVTGNHRKPSLLAHPGPLVKSGERVILQCWSDIMFEHFFLHKEGISKDPSRLVGQIHDGVSKANFSIGSMMRALAGTYRCYGSVTHTPYQLSAPSDPLDIVVTGLYEKPSLSAQPGPKVQAGESVTLSCSSRSSYDMYHLSREGGAHERRLPAVRKVNRTFQADFPLGPATHGGTYRCFGSFRHSPYEWSDPSDPLLVSVTGNPSSSWPSPTEPSSKSGNLRHLHILIGTSVVKIPFTILLFFLLHRWCSNKKKCCCNGPRACREQK

SEQ ID NO: 40 - DNA, 1149 bp, Homo sapiens
  source: /note="KIR3DS1"
atgttgctcatggtcgtcagcatggcgtgtgttgggttgttcttggtccagagggccggtccacacatgggtggtcaggacaagcccttcctgtctgcctggcccagcgctgtggtgcctcgcggaggacacgtgactcttcggtgtcactatcgtcataggtttaacaatttcatgctatacaaagaagacagaatccacgttcccatcttccatggcagaatattccaggagggcttcaacatgagccctgtgaccacagcacatgcagggaactacacatgtcggggttcacacccacactcccccactgggtggtcggcacccagcaaccccatggtgatcatggtcacaggaaaccacagaaaaccttccctcctggcccacccaggtcccctggtgaaatcaggagagagagtcatcctgcaatgttggtcagatatcatgtttgagcacttctttctgcacaaagagtggatctctaaggacccctcacgcctcgttggacagatccatgatggggtctccaaggccaatttctccatcggttccatgatgcgtgcccttgcagggacctacagatgctacggttctgttactcacaccccctatcagttgtcagctcccagtgatcccctggacatcgtggtcacaggtctatatgagaaaccttctctctcagcccagccgggccccaaggttcaggcaggagagagcgtgaccttgtcctgtagctcccggagctcctatgacatgtaccatctatccagggaggggggagcccatgaacgtaggctccctgcagtgcgcaaggtcaacagaacattccaggcagatttccctctgggccctgccacccacggagggacctacagatgcttcggctctttccgtcactctccctacgagtggtcagacccgagtgacccactgcttgtttctgtcacaggaaacccttcaagtagttggccttcacccacagaaccaagctccaaatctggtaacctcagacacctgcacattctgattgggacctcagtggtcaaaatccctttcaccatcctcctcttctttctccttcatcgctggtgctccaacaaaaaaaaatgctgctgtaatggaccaagagcctgcagggaacagaagtga

SEQ ID NO: 41 - protein, 231 aa, Homo sapiens
  source: /note="NKG2C"
MSKQRGTFSEVSLAQDPKRQQRKPKGNKSSISGTEQEIFQVELNLQNPSLNHQGIDKIYDCQGLLPPPEKLTAEVLGIICIVLMATVLKTIVLIPFLEQNNSSPNTRTQKARHCGHCPEEWITYSNSCYYIGKERRTWEESLLACTSKNSSLLSIDNEEEMKFLASILPSSWIGVFRNSSHHPWVTINGLAFKHKIKDSDNAELNCAVLQVNRLKSAQCGSSMIYHCKHKL

SEQ ID NO: 42 - DNA, 696 bp, Homo sapiens
  source: /note="NKG2C"
atgaataaacaaagaggaaccttctcagaagtgagtctggcccaggacccaaagcggcagcaaaggaaacctaaaggcaataaaagctccatttcaggaaccgaacaggaaatattccaagtagaattaaatcttcaaaatccttccctgaatcatcaagggattgataaaatatatgactgccaaggtttactgccacctccagagaagctcactgccgaggtcctaggaatcatttgcattgtcctgatggccactgtgttaaaaacaatagttcttattcctttcctggagcagaacaatttttccccgaatacaagaacgcagaaagcacgtcattgtggccattgtcctgaggagtggattacatattccaacagttgttattacattggtaaggaaagaagaacttgggaagagagtttgctggcctgtacttcgaagaactccagtctgctttctatagataatgaagaagaaatgaaatttctggccagcattttaccttcctcatggattggtgtgtttcgtaacagcagtcatcatccatgggtgacaataaatggtttggctttcaaacataagataaaagactcagataatgctgaacttaactgtgcagtgctacaagtaaatcgacttaaatcagcccagtgtggatcttcaatgatatatcattgtaagcataagctttag

SEQ ID NO: 43 - protein, 354 aa, Homo sapiens
  source: /note="CCR7"
QDEVTDDYIGDNTTVDYTLFESLCSKKDVRNFKAWFLPIMYSIICFVGLLGNGLVVLTYIYFKRLKTMTDTYLLNLAVADILFLLTLPFWAYSAAKSWVFGVHFCKLIFAIYKMSFFSGMLLLLCISIDRYVAIVQAVSAHRHRARVLLISKLSCVGIWILATVLSIPELLYSDLQRSSSEQAMRCSLITEHVEAFITIQVAQMVIGFLVPLLAMSFCYLVIIRTLLQARNFERNKAIKVIIAVVVVFIVFQLPYNGVVLAQTVANFNITSSTCELSKQLNIAYDVTYSLACVRCCVNPFLYAFIGVKFRNDLFKLFKDLGCLSQEQLRQWSSCRHIRRSSMSVEAETTTTFSP

SEQ ID NO: 44 - DNA, 1137 bp, Homo sapiens
  source: /note="CCR7"
atggacctggggaaaccaatgaaaagcgtgctggtggtggctctccttgtcattttccaggtatgcctgtgtcaagatgaggtcacggacgattacatcggagacaacaccacagtggactacactttgttcgagtctttgtgctccaagaaggacgtgcggaactttaaagcctggttcctccctatcatgtactccatcatttgtttcgtgggcctactgggcaatgggctggtcgtgttgacctatatctatttcaagaggctcaagaccatgaccgatacctacctgctcaacctggcggtggcagacatcctcttcctcctgacccttcccttctgggcctacagcgcggccaagtcctgggtcttcggtgtccacttttgcaagctcatctttgccatctacaagatgagcttcttcagtggcatgctcctacttctttgcatcagcattgaccgctacgtggccatcgtccaggctgtctcagctcaccgccaccgtgcccgcgtccttctcatcagcaagctgtcctgtgtgggcatctggatactagccacagtgctctccatcccagagctcctgtacagtgacctccagaggagcagcagtgagcaagcgatgcgatgctctctcatcacagagcatgtggaggcctttatcaccatccaggtggcccagatggtgatcggctttctggtccccctgctggccatgagcttctgttaccttgtcatcatccgcaccctgctccaggcacgcaactttgagcgcaacaaggccatcaaggtgatcatcgctgtggtcgtggtcttcatagtcttccagctgccctacaatggggtggtcctggcccagacggtggccaacttcaacatcaccagtagcacctgtgagctcagtaagcaactcaacatcgcctacgacgtcacctacagcctggcctgcgtccgctgctgcgtcaaccctttcttgtacgccttcatcggcgtcaagttccgcaacgatctcttcaagctcttcaaggacctgggctgcctcagccaggagcagctccggcagtggtcttcctgtcggcacatccggcgctcctccatgagtgtggaggccgagaccaccaccaccttctccccatag

SEQ ID NO: 45 - protein, 368 aa, Homo sapiens
  source: /note="CXCR3"
MVLEVSDHQVLNDAEVAALLENFSSSYDYGENESDSCCTSPPCPQDFSLNFDRAFLPALYSLLFLLGLLGNGAVAAVLLSRRTALSSTDTFLLHLAVADTLLVLTLPLWAVDAAVQWVFGSGLCKVAGALFNINFYAGALLLACISFDRYLNIVHATQLYRRGPPARVTLTCLAVWGLCLLFALPDFIFLSAHHDERLNATHCQYNFPQVGRTALRVLQLVAGFLLPLLVMAYCYAHILAVLLVSRGQRRLRAMRLVVVVVVAFALCWTPYHLVVLVDILMDLGALARNCGRESRVDVAKSVTSGLGYMHCCLNPLLYAFVGVKFRERMWMLLLRLGCPNQRGLQRQPSSSRRDSSWSETSEASYSGL

SEQ ID NO: 46 - DNA, 1248 bp, Homo sapiens
  source: /note="CXCR3"
atggagttgaggaagtacggccctggaagactggcggggacagttataggaggagctgctcagagtaaatcacagactaaatcagactcaatcacaaaagagttcctgccaggcctttacacagccccttcctccccgttcccgccctcacaggtgagtgaccaccaagtgctaaatgacgccgaggttgccgccctcctggagaacttcagctcttcctatgactatggagaaaacgagagtgactcgtgctgtacctccccgccctgcccacaggacttcagcctgaacttcgaccgggccttcctgccagccctctacagcctcctctttctgctggggctgctgggcaacggcgcggtggcagccgtgctgctgagccggcggacagccctgagcagcaccgacaccttcctgctccacctagctgtagcagacacgctgctggtgctgacactgccgctctgggcagtggacgctgccgtccagtgggtctttggctctggcctctgcaaagtggcaggtgccctcttcaacatcaacttctacgcaggagccctcctgctggcctgcatcagctttgaccgctacctgaacatagttcatgccacccagctctaccgccgggggcccccggcccgcgtgaccctcacctgcctggctgtctgggggctctgcctgcttttcgccctcccagacttcatcttcctgtcggcccaccacgacgagcgcctcaacgccacccactgccaatacaacttcccacaggtgggccgcacggctctgcgggtgctgcagctggtggctggctttctgctgcccctgctggtcatggcctactgctatgcccacatcctggccgtgctgctggtttccaggggccagcggcgcctgcgggccatgcggctggtggtggtggtcgtggtggcctttgccctctgctggaccccctatcacctggtggtgctggtggacatcctcatggacctgggcgctttggcccgcaactgtggccgagaaagcagggtagacgtggccaagtcggtcacctcaggcctgggctacatgcactgctgcctcaacccgctgctctatgcctttgtaggggtcaagttccgggagcggatgtggatgctgctcttgcgcctgggctgccccaaccagagagggctccagaggcagccatcgtcttcccgccgggattcatcctggtctgagacctcagaggcctcctactcgggcttgtga

SEQ ID NO: 47 - protein, 344 aa, Homo sapiens
  source: /note="L-selectin"
DFLAHHGTDCWTYHYSEKPMNWQRARRFCRDNYTDLVAIQNKAEIEYLEKTLPFSRSYYWIGIRKIGGIWTWVGTNKSLTEEAENWGDGEPNNKKNKEDCVEIYIKRNKDAGKWNDDACHKLKAALCYTASCQPWSCSGHGECVEIINNYTCNCDVGYYGPQCQFVIQCEPLEAPELGTMDCTHPLGNFSFSSQCAFSCSEGTNLTGIEETTCGPFGNWSSPEPTCQVIQCEPLSAPDLGIMNCSHPLASFSFTSACTFICSEGTELIGKKKTICESSGIWSNPSPICQKLDKSFSMIKEGDYNPLFIPVAVMVTAFSGLAFIIWLARRLKKGKKSKRSMNDPY

SEQ ID NO: 48 - DNA, 1158 bp, Homo sapiens
  source: /note="L-selectin"
atgggctgcagaagaactagagaaggaccaagcaaagccatgatatttccatggaaatgtcagagcacccagagggacttatggaacatcttcaagttgtgggggtggacaatgctctgttgtgatttcctggcacatcatggaaccgactgctggacttaccattattctgaaaaacccatgaactggcaaagggctagaagattctgccgagacaattacacagatttagttgccatacaaaacaaggcggaaattgagtatctggagaagactctgcctttcagtcgttcttactactggataggaatccggaagataggaggaatatggacgtgggtgggaaccaacaaatctcttactgaagaagcagagaactggggagatggtgagcccaacaacaagaagaacaaggaggactgcgtggagatctatatcaagagaaacaaagatgcaggcaaatggaacgatgacgcctgccacaaactaaaggcagccctctgttacacagcttcttgccagccctggtcatgcagtggccatggagaatgtgtagaaatcatcaataattacacctgcaactgtgatgtggggtactatgggccccagtgtcagtttgtgattcagtgtgagcctttggaggccccagagctgggtaccatggactgtactcaccctttgggaaacttcagcttcagctcacagtgtgccttcagctgctctgaaggaacaaacttaactgggattgaagaaaccacctgtggaccatttggaaactggtcatctccagaaccaacctgtcaagtgattcagtgtgagcctctatcagcaccagatttggggatcatgaactgtagccatcccctggccagcttcagctttacctctgcatgtaccttcatctgctcagaaggaactgagttaattgggaagaagaaaaccatttgtgaatcatctggaatctggtcaaatcctagtccaatatgtcaaaaattggacaaaagtttctcaatgattaaggagggtgattataaccccctcttcattccagtggcagtcatggttactgcattctctgggttggcatttatcatttggctggcaaggagattaaaaaaaggcaagaaatccaagagaagtatgaatgacccatattaa

SEQ ID NO: 49 - protein, 350 aa, Homo sapiens
  source: /note="CXCR1"
  MOD_RES (31)..(31): Any amino acid
MSNITDPQMWDFDDLNFTGMPPADEDYSPCXLETETLNKYVVIIAYALVFLLSLLGNSLVMLVILYSRVGRSVTDVYLLNLALADLLFALTLPIWAASKVNGWIFGTFLCKVVSLLKEVNFYSGILLLACISVDRYLAIVHATRTLTQKRHLVKFVCLGCWGLSMNLSLPFFLFRQAYHPNNSSPVCYEVLGNDTAKWRMVLRILPHTFGFIVPLFVMLFCYGFTLRTLFKAHMGQKHRAMRVIFAVVLIFLLCWLPYNLVLLADTLMRTQVIQESCERRNNIGRALDATEILGFLHSCLNPIIYAFIGQNFRHGFLKILAMHGLVSKEFLARHRVTSYTSSSVNVSSNL

SEQ ID NO: 50 - DNA, 1053 bp, Homo sapiens
  source: /note="CXCR1"
atgtcaaatattacagatccacagatgtgggattttgatgatctaaatttcactggcatgccacctgcagatgaagattacagcccctgtatgctagaaactgagacactcaacaagtatgttgtgatcatcgcctatgccctagtgttcctgctgagcctgctgggaaactccctggtgatgctggtcatcttatacagcagggtcggccgctccgtcactgatgtctacctgctgaacctggccttggccgacctactctttgccctgaccttgcccatctgggccgcctccaaggtgaatggctggatttttggcacattcctgtgcaaggtggtctcactcctgaaggaagtcaacttctacagtggcatcctgctgttggcctgcatcagtgtggaccgttacctggccattgtccatgccacacgcacactgacccagaagcgtcacttggtcaagtttgtttgtcttggctgctggggactgtctatgaatctgtccctgcccttcttccttttccgccaggcttaccatccaaacaattccagtccagtttgctatgaggtcctgggaaatgacacagcaaaatggcggatggtgttgcggatcctgcctcacacctttggcttcatcgtgccgctgtttgtcatgctgttctgctatggattcaccctgcgtacactgtttaaggcccacatggggcagaagcaccgagccatgagggtcatctttgctgtcgtcctcatcttcctgctttgctggctgccctacaacctggtcctgctggcagacaccctcatgaggacccaggtgatccaggagagctgtgagcgccgcaacaacatcggccgggccctggatgccactgagattctgggatttctccatagctgcctcaaccccatcatctacgccttcatcggccaaaattttcgccatggattcctcaagatcctggctatgcatggcctggtcagcaaggagttcttggcacgtcatcgtgttacctcctacacttcttcgtctgtcaatgtctcttccaacctctga

SEQ ID NO: 51 - protein, 360 aa, Homo sapiens
  source: /note="CXCR2"
MEDFNMESDSFEDFWKGEDLSNYSYSSTLPPFLLDAAPCEPESLEINKYFVVIIYALVFLLSLLGNSLVMLVILYSRVGRSVTDVYLLNLALADLLFALTLPIWAASKVNGWIFGTFLCKVVSLLKEVNFYSGILLLACISVDRYLAIVHATRTLTQKRYLVKFICLSIWGLSLLLALPVLLFRRTVYSSNVSPACYEDMGNNTANWRMLLRILPQSFGFIVPLLIMLFCYGFTLRTLFKAHMGQKHRAMRVIFAVVLIFLLCWLPYNLVLLADTLMRTQVIQETCERRNHIDRALDATEILGILHSCLNPLIYAFIGQKFRHGLLKILAIHGLISKDSLPKDSRPSFVGSSSGHTSTTL

SEQ ID NO: 52 - DNA, 1083 bp, Homo sapiens
  source: /note="CXCR2"
atggaagattttaacatggagagtgacagctttgaagatttctggaaaggtgaagatcttagtaattacagttacagctctaccctgcccccttttctactagatgccgccccatgtgaaccagaatccctggaaatcaacaagtattttgtggtcattatctatgccctggtattcctgctgagcctgctgggaaactccctcgtgatgctggtcatcttatacagcagggtcggccgctccgtcactgatgtctacctgctgaacctagccttggccgacctactctttgccctgaccttgcccatctgggccgcctccaaggtgaatggctggatttttggcacattcctgtgcaaggtggtctcactcctgaaggaagtcaacttctatagtggcatcctgctactggcctgcatcagtgtggaccgttacctggccattgtccatgccacacgcacactgacccagaagcgctacttggtcaaattcatatgtctcagcatctggggtctgtccttgctcctggccctgcctgtcttacttttccgaaggaccgtctactcatccaatgttagcccagcctgctatgaggacatgggcaacaatacagcaaactggcggatgctgttacggatcctgccccagtcctttggcttcatcgtgccactgctgatcatgctgttctgctacggattcaccctgcgtacgctgtttaaggcccacatggggcagaagcaccgggccatgcgggtcatctttgctgtcgtcctcatcttcctgctctgctggctgccctacaacctggtcctgctggcagacaccctcatgaggacccaggtgatccaggagacctgtgagcgccgcaatcacatcgaccgggctctggatgccaccgagattctgggcatccttcacagctgcctcaaccccctcatctacgccttcattggccagaagtttcgccatggactcctcaagattctagctatacatggcttgatcagcaaggactccctgcccaaagacagcaggccttcctttgttggctcttcttcagggcacacttccactactctctaa

SEQ ID NO: 53 - protein, 355 aa, Homo sapiens
  source: /note="CXC3CR1"
MDQFPESVTENFEYDDLAEACYIGDIVVFGTVFLSIFYSVIFAIGLVGNLLVVFALTNSKKPKSVTDIYLLNLALSDLLFVATLPFWTHYLINEKGLHNAMCKFTTAFFFIGFFGSIFFITVISIDRYLAIVLAANSMNNRTVQHGVTISLGVWAAAILVAAPQFMFTKQKENECLGDYPEVLQEIWPVLRNVETNFLGFLLPLLIMSYCYFRIIQTLFSCKNHKKAKAIKLILLVVIVFFLFWTPYNVMIFLETLKLYDFFPSCDMRKDLRLALSVTETVAFSHCCLNPLIYAFAGEKFRRYLYHLYGKCLAVLCGRSVHVDFSSSESQRSRHGSVLSSNFTYHTSDGDALLLL

SEQ ID NO: 54 - DNA, 1068 bp, Homo sapiens
  source: /note="CXC3CR1"
atggatcagttccctgaatcagtgacagaaaactttgagtacgatgatttggctgaggcctgttatattggggacatcgtggtctttgggactgtgttcctgtccatattctactccgtcatctttgccattggcctggtgggaaatttgttggtagtgtttgccctcaccaacagcaagaagcccaagagtgtcaccgacatttacctcctgaacctggccttgtctgatctgctgtttgtagccactttgcccttctggactcactatttgataaatgaaaagggcctccacaatgccatgtgcaaattcactaccgccttcttcttcatcggcttttttggaagcatattcttcatcaccgtcatcagcattgataggtacctggccatcgtcctggccgccaactccatgaacaaccggaccgtgcagcatggcgtcaccatcagcctaggcgtctgggcagcagccattttggtggcagcaccccagttcatgttcacaaagcagaaagaaaatgaatgccttggtgactaccccgaggtcctccaggaaatctggcccgtgctccgcaatgtggaaacaaattttcttggcttcctactccccctgctcattatgagttattgctacttcagaatcatccagacgctgttttcctgcaagaaccacaagaaagccaaagccattaaactgatccttctggtggtcatcgtgtttttcctcttctggacaccctacaacgttatgattttcctggagacgcttaagctctatgacttctttcccagttgtgacatgaggaaggatctgaggctggccctcagtgtgactgagacggttgcatttagccattgttgcctgaatcctctcatctatgcatttgctggggagaagttcagaagatacctttaccacctgtatgggaaatgcctggctgtcctgtgtgggcgctcagtccacgttgatttctcctcatctgaatcacaaaggagcaggcatggaagtgttctgagcagcaattttacttaccacacgagtgatggagatgcattgctccttctctga

SEQ ID NO: 55 - protein, 373 aa, Homo sapiens
  source: /note="ChemR23"
MRMEDEDYNTSISYGDEYPDYLDSIVVLEDLSPLEARVTRIFLVVVYSIVCFLGILGNGLVIIIATFKMKKTVNMVWFLNLAVADFLFNVFLPIHITYAAMDYHWVFGTAMCKISNFLLIHNMFTSVFLLTIISSDRCISVLLPVWSQNHRSVRLAYMACMVIWVLAFFLSSPSLVFRDTANLHGKISCFNNFSLSTPGSSSWPTHSQMDPVGYSRHMVVTVTRFLCGFLVPVLIITACYLTIVCKLQRNRLAKTKKPFKIIVTIIITFFLCWCPYHTLNLLELHHTAMPGSVFSLGLPLATALAIANSCMNPILYVFMGQDFKKFKVALFSRLVNALSEDTGHSSYPSHRSFTKMSSMNERTSMNERETGML

SEQ ID NO: 56 - DNA, 1122 bp, Homo sapiens
  source: /note="ChemR23"
atgagaatggaggatgaagattacaacacttccatcagttacggtgatgaataccctgattatttagactccattgtggttttggaggacttatcccccttggaagccagggtgaccaggatcttcctggtggtggtctacagcatcgtctgcttcctcgggattctgggcaatggtctggtgatcatcattgccaccttcaagatgaagaagacagtgaacatggtctggttcctcaacctggcagtggcagatttcctgttcaacgtcttcctcccaatccatatcacctatgccgccatggactaccactgggttttcgggacagccatgtgcaagatcagcaacttccttctcatccacaacatgttcaccagcgtcttcctgctgaccatcatcagctctgaccgctgcatctctgtgctcctccctgtctggtcccagaaccaccgcagcgttcgcctggcttacatggcctgcatggtcatctgggtcctggctttcttcttgagttccccatctctcgtcttccgggacacagccaacctgcatgggaaaatatcctgcttcaacaacttcagcctgtccacacctgggtcttcctcgtggcccactcactcccaaatggaccctgtggggtatagccggcacatggtggtgactgtcacccgcttcctctgtggcttcctggtcccagtcctcatcatcacagcttgctacctcaccatcgtgtgcaaactgcagcgcaaccgcctggccaagaccaagaagcccttcaagattattgtgaccatcatcattaccttcttcctctgctggtgcccctaccacacactcaacctcctagagctccaccacactgccatgcctggctctgtcttcagcctgggtttgcccctggccactgcccttgccattgccaacagctgcatgaaccccattctgtatgttttcatgggtcaggacttcaagaagttcaaggtggccctcttctctcgcctggtcaatgctctaagtgaagatacaggccactcttcctaccccagccatagaagctttaccaagatgtcatcaatgaatgagaggacttctatgaatgagagggagaccggcatgctttga

SEQ ID NO: 57 - protein, 352 aa, Homo sapiens
  source: /note="CXCR4"
MEGISIYTSDNYTEEMGSGDYDSMKEPCFREENANFNKIFLPTIYSIIFLTGIVGNGLVILVMGYQKKLRSMTDKYRLHLSVADLLFVITLPFWAVDAVANWYFGNFLCKAVHVIYTVNLYSSVLILAFISLDRYLAIVHATNSQRPRKLLAEKVVYVGVWIPALLLTIPDFIFANVSEADDRYICDRFYPNDLWVVVFQFQHIMVGLILPGIVILSCYCIIISKLSHSKGHQKRKALKTTVILILAFFACWLPYYIGISIDSFILLEIIKQGCEFENTVHKWISITEALAFFHCCLNPILYAFLGAKFKTSAQHALTSVSRGSSLKILSKGKRGGHSSVSTESESSSFHSS

SEQ ID NO: 58 - DNA, 1071 bp, Homo sapiens
  source: /note="CXCR4"
atgtccattcctttgcctcttttgcagatatacacttcagataactacaccgaggaaatgggctcaggggactatgactccatgaaggaaccctgtttccgtgaagaaaatgctaatttcaataaaatcttcctgcccaccatctactccatcatcttcttaactggcattgtgggcaatggattggtcatcctggtcatgggttaccagaagaaactgagaagcatgacggacaagtacaggctgcacctgtcagtggccgacctcctctttgtcatcacgcttcccttctgggcagttgatgccgtggcaaactggtactttgggaacttcctatgcaaggcagtccatgtcatctacacagtcaacctctacagcagtgtcctcatcctggccttcatcagtctggaccgctacctggccatcgtccacgccaccaacagtcagaggccaaggaagctgttggctgaaaaggtggtctatgttggcgtctggatccctgccctcctgctgactattcccgacttcatctttgccaacgtcagtgaggcagatgacagatatatctgtgaccgcttctaccccaatgacttgtgggtggttgtgttccagtttcagcacatcatggttggccttatcctgcctggtattgtcatcctgtcctgctattgcattatcatctccaagctgtcacactccaagggccaccagaagcgcaaggccctcaagaccacagtcatcctcatcctggctttcttcgcctgttggctgccttactacattgggatcagcatcgactccttcatcctcctggaaatcatcaagcaagggtgtgagtttgagaacactgtgcacaagtggatttccatcaccgaggccctagctttcttccactgttgtctgaaccccatcctctatgctttccttggagccaaatttaaaacctctgcccagcacgcactcacctctgtgagcagagggtccagcctcaagatcctctccaaaggaaagcgaggtggacattcatctgtttccactgagtctgagtcttcaagttttcactccagctaa

SEQ ID NO: 59 - protein, 352 aa, Homo sapiens [sequence omitted]

SEQ ID NO: 60 - DNA, 1059 bp, Homo sapiens
  source: /note="CCR5"
atggattatcaagtgtcaagtccaatctatgacatcaattattatacatcggagccctgccaaaaaatcaatgtgaagcaaatcgcagcccgcctcctgcctccgctctactcactggtgttcatctttggttttgtgggcaacatgctggtcatcctcatcctgataaactgcaaaaggctgaagagcatgactgacatctacctgctcaacctggccatctctgacctgtttttccttcttactgtccccttctgggctcactatgctgccgcccagtgggactttggaaatacaatgtgtcaactcttgacagggctctattttataggcttcttctctggaatcttcttcatcatcctcctgacaatcgataggtacctggctgtcgtccatgctgtgtttgctttaaaagccaggacggtcacctttggggtggtgacaagtgtgatcacttgggtggtggctgtgtttgcgtctctcccaggaatcatctttaccagatctcaaaaagaaggtcttcattacacctgcagctctcattttccatacagtcagtatcaattctggaagaatttccagacattaaagatagtcatcttggggctggtcctgccgctgcttgtcatggtcatctgctactcgggaatcctaaaaactctgcttcggtgtcgaaatgagaagaagaggcacagggctgtgaggcttatcttcaccatcatgattgtttattttctcttctgggctccctacaacattgtccttctcctgaacaccttccaggaattctttggcctgaataattgcagtagctctaacaggttggaccaagctatgcaggtgacagagactcttgggatgacgcactgctgcatcaaccccatcatctatgcctttgtcggggagaagttcagaaactacctcttagtcttcttccaaaagcacattgccaaacgcttctgcaaatgctgttctattttccagcaagaggctcccgagcgagcaagctcagtttacacccgatccactggggagcaggaaatatctgtgggcttgtga

SEQ ID NO: 61 - protein, 398 aa, Homo sapiens
  source: /note="S1P5"
MESGLLRPAPVSEVIVLHYNYTGKLRGARYQPGAGLRADAVVCLAVCAFIVLENLAVLLVLGRHPRFHAPMFLLLGSLTLSDLLAGAAYAANILLSGPLTLKLSPALWFAREGGVFVALTASVLSLLAIALERSLTMARRGPAPVSSRGRTLAMAAAAWGVSLLLGLLPALGWNCLGRLDACSTVLPLYAKAYVLFCVLAFVGILAAICALYARIYCQVRANARRLPARPGTAGTTSTRARRKPRSLALLRTLSVVLLAFVACWGPLFLLLLLDVACPARTCPVLLQADPFLGLAMANSLLNPIIYTLTNRDLRHALLRLVCCGRHSCGRDPSGSQQSASAAEASGGLRRCLPPGLDGSFSGSERSSPQRDGLDTSGSTGSPGAPTAARTLVSEPAAD

SEQ ID NO: 62 - DNA, 1197 bp, Homo sapiens
  source: /note="S1P5"
atggagtcggggctgctgcggccggcgccggtgagcgaggtcatcgtcctgcattacaactacaccggcaagctccgcggtgcgcgctaccagccgggtgccggcctgcgcgccgacgccgtggtgtgcctggcggtgtgcgccttcatcgtgctagagaatctagccgtgttgttggtgctcggacgccacccgcgcttccacgctcccatgttcctgctcctgggcagcctcacgttgtcggatctgctggcaggcgccgcctacgccgccaacatcctactgtcggggccgctcacgctgaaactgtcccccgcgctctggttcgcacgggagggaggcgtcttcgtggcactcactgcgtccgtgctgagcctcctggccatcgcgctggagcgcagcctcaccatggcgcgcagggggcccgcgcccgtctccagtcgggggcgcacgctggcgatggcagccgcggcctggggcgtgtcgctgctcctcgggctcctgccagcgctgggctggaattgcctgggtcgcctggacgcttgctccactgtcttgccgctctacgccaaggcctacgtgctcttctgcgtgctcgccttcgtgggcatcctggccgctatctgtgcactctacgcgcgcatctactgccaggtacgcgccaacgcgcggcgcctgccggcacggcccgggactgcggggaccacctcgacccgggcgcgtcgcaagccgcgctcgctggccttgctgcgcacgctcagcgtggtgctcctggcctttgtggcatgttggggccccctcttcctgctgctgttgctcgacgtggcgtgcccggcgcgcacctgtcctgtactcctgcaggccgatcccttcctgggactggccatggccaactcacttctgaaccccatcatctacacgctcaccaaccgcgacctgcgccacgcgctcctgcgcctggtctgctgcggacgccactcctgcggcagagacccgagtggctcccagcagtcggcgagcgcggctgaggcttccgggggcctgcgccgctgcctgcccccgggccttgatgggagcttcagcggctcggagcgctcatcgccccagcgcgacgggctggacaccagcggctccacaggcagccccggtgcacccacagccgcccggactctggtatcagaaccggctgcagactga

SEQ ID NO: 63 - protein, 951 aa, Homo sapiens
  source: /note="cKit"
QPSVSPGEPSPPSIHPGKSDLIVRVGDEIRLLCTDPGFVKWTFEILDETNENKQNEWITEKAEATNTGKYTCTNKHGLSNSIYVFVRDPAKLFLVDRSLYGKEDNDTLVRCPLTDPEVTNYSLKGCQGKPLPKDLRFIPDPKAGIMIKSVKRAYHRLCLHCSVDQEGKSVLSEKFILKVRPAFKAVPVVSVSKASYLLREGEEFTVTCTIKDVSSSVYSTWKRENSQTKLQEKYNSWHHGDFNYERQATLTISSARVNDSGVFMCYANNTFGSANVTTTLEVVDKGFINIFPMINTTVFVNDGENVDLIVEYEAFPKPEHQQWIYMNRTFTDKWEDYPKSENESNIRYVSELHLTRLKGTEGGTYTFLVSNSDVNAAIAFNVYVNTKPEILTYDRLVNGMLQCVAAGFPEPTIDWYFCPGTEQRCSASVLPVDVQTLNSSGPPFGKLVVQSSIDSSAFKHNGTVECKAYNDVGKTSAYFNFAFKGNNKEQIHPHTLFTPLLIGFVIVAGMMCIIVMILTYKYLQKPMYEVQWKVVEEINGNNYVYIDPTQLPYDHKWEFPRNRLSFGKTLGAGAFGKVVEATAYGLIKSDAAMTVAVKMLKPSAHLTEREALMSELKVLSYLGNHMNIVNLLGACTIGGPTLVITEYCCYGDLLNFLRRKRDSFICSKQEDHAEAALYKNLLHSKESSCSDSTNEYMDMKPGVSYVVPTKADKRRSVRIGSYIERDVTPAIMEDDELALDLEDLLSFSYQVAKGMAFLASKNCIHRDLAARNILLTHGRITKICDFGLARDIKNDSNYVVKGNARLPVKWMAPESIFNCVYTFESDVWSYGIFLWELFSLGSSPYPGMPVDSKFYKMIKEGFRMLSPEHAPAEMYDIMKTCWDADPLKRPTFKQIVQLIEKQISESTNHIYSNLANCSPNRQKPVVDHSVRINSVGSTASSSQPLLVHDDV

SEQ ID NO: 64 - DNA, 2931 bp, Homo sapiens
  source: /note="cKit"
atgagaggcgctcgcggcgcctgggattttctctgcgttctgctcctactgcttcgcgtccagacaggctcttctcaaccatctgtgagtccaggggaaccgtctccaccatccatccatccaggaaaatcagacttaatagtccgcgtgggcgacgagattaggctgttatgcactgatccgggctttgtcaaatggacttttgagatcctggatgaaacgaatgagaataagcagaatgaatggatcacggaaaaggcagaagccaccaacaccggcaaatacacgtgcaccaacaaacacggcttaagcaattccatttatgtgtttgttagagatcctgccaagcttttccttgttgaccgctccttgtatgggaaagaagacaacgacacgctggtccgctgtcctctcacagacccagaagtgaccaattattccctcaaggggtgccaggggaagcctcttcccaaggacttgaggtttattcctgaccccaaggcgggcatcatgatcaaaagtgtgaaacgcgcctaccatcggctctgtctgcattgttctgtggaccaggagggcaagtcagtgctgtcggaaaaattcatcctgaaagtgaggccagccttcaaagctgtgcctgttgtgtctgtgtccaaagcaagctatcttcttagggaaggggaagaattcacagtgacgtgcacaataaaagatgtgtctagttctgtgtactcaacgtggaaaagagaaaacagtcagactaaactacaggagaaatataatagctggcatcacggtgacttcaattatgaacgtcaggcaacgttgactatcagttcagcgagagttaatgattctggagtgttcatgtgttatgccaataatacttttggatcagcaaatgtcacaacaaccttggaagtagtagataaaggattcattaatatcttccccatgataaacactacagtatttgtaaacgatggagaaaatgtagatttgattgttgaatatgaagcattccccaaacctgaacaccagcagtggatctatatgaacagaaccttcactgataaatgggaagattatcccaagtctgagaatgaaagtaatatcagatacgtaagtgaacttcatctaacgagattaaaaggcaccgaaggaggcacttacacattcctagtgtccaattctgacgtcaatgctgccatagcatttaatgtttatgtgaatacaaaaccagaaatcctgacttacgacaggctcgtgaatggcatgctccaatgtgtggcagcaggattcccagagcccacaatagattggtatttttgtccaggaactgagcagagatgctctgcttctgtactgccagtggatgtgcagacactaaactcatctgggccaccgtttggaaagctagtggttcagagttctatagattctagtgcattcaagcacaatggcacggttgaatgtaaggcttacaacgatgtgggcaagacttctgcctattttaactttgcatttaaaggtaacaacaaagagcaaatccatccccacaccctgttcactcctttgctgattggtttcgtaatcgtagctggcatgatgtgcattattgtgatgattctgacctacaaatatttacagaaacccatgtatgaagtacagtggaaggttgttgaggagataaatggaaacaattatgtttacatagacccaacacaacttccttatgatcacaaatgggagtttcccagaaacaggctgagttttgggaaaaccctgggtgctggagctttcgggaaggttgttgaggcaactgcttatggcttaattaagtcagatgcggccatgactgtcgctgtaaagatgctcaagccgagtgcccatttgacagaacgggaagccctcatgtctgaactcaaagtcctgagttaccttggtaatcacatgaatattgtgaatctacttggagcctgcaccattggagggcccaccctggtcattacagaatattgttgctatggtgatcttttgaattttttgagaagaaaacgtgattcatttatttgttcaaagcaggaagatcatgcagaagctgcactttataagaatcttctgcattcaaaggagtcttcctgcagcgatagtactaatgagtacatggacatgaaacctggagtttcttatgttgtcccaaccaaggccgacaaaaggagatctgtgagaataggctcatacatagaaagagatgtgactcccgccatcatggaggatgacgagttggccctagacttagaagacttgctgagcttttcttaccaggtggcaaagggcatggctttcctcgcctccaagaattgtattcacagagacttggcagccagaaatatcctccttactcatggtcggatcacaaagatttgtgattttggtctagccagagacatcaagaatgattctaattatgtggttaaaggaaacgctcgactacctgtgaagtggatggcacctgaaagcattttcaactgtgtatacacgtttgaaagtgacgtctggtcctatgggatttttctttgggagctgttctctttaggaagcagcccctatcctggaatgccggtcgattctaagttctacaagatgatcaaggaaggcttccggatgctcagccctgaacacgcacctgctgaaatgtatgacataatgaagacttgctgggatgcagatcccctaaaaagaccaacattcaagcaaattgttcagctaattgagaagcagatttcagagagcaccaatcatatttactccaacttagcaaactgcagccccaaccgacagaagcccgtggtagaccattctgtgcggatcaattctgtcggcagcaccgcttcctcctcccagcctctgcttgtgcacgacgatgtctga

SEQ ID NO: 65 - protein, 2549 aa, Homo sapiens
  source: /note="mTor"
MLGTGPAAATTAATTSSNVSVLQQFASGLKSRNEETRAKAAKELQHYVTMELREMSQEESTRFYDQLNHHIFELVSSSDANERKGGILAIASLIGVEGGNATRIGRFANYLRNLLPSNDPVVMEMASKAIGRLAMAGDTFTAEYVEFEVKRALEWLGADRNEGRRHAAVLVLRELAISVPTFFFQQVQPFFDNIFVAVWDPKQAIREGAVAALRACLILTTQREPKEMQKPQWYRHTFEEAEKGFDETLAKEKGMNRDDRIHGALLILNELVRISSMEGERLREEMEEITQQQLVHDKYCKDLMGFGTKPRHITPFTSFQAVQPQQSNALVGLLGYSSHQGLMGFGTSPSPAKSTLVESRCCRDLMEEKFDQVCQWVLKCRNSKNSLIQMTILNLLPRLAAFRPSAFTDTQYLQDTMNHVLSCVKKEKERTAAFQALGLLSVAVRSEFKVYLPRVLDIIRAALPPKDFAHKRQKAMQVDATVFTCISMLARAMGPGIQQDIKELLEPMLAVGLSPALTAVLYDLSRQIPQLKKDIQDGLLKMLSLVLMHKPLRHPGMPKGLAHQLASPGLTTLPEASDVGSITLALRTLGSFEFEGHSLTQFVRHCADHFLNSEHKEIRMEAARTCSRLLTPSIHLISGHAHVVSQTAVQVVADVLSKLLVVGITDPDPDIRYCVLASLDERFDAHLAQAENLQALFVALNDQVFEIRELAICTVGRLSSMNPAFVMPFLRKMLIQILTELEHSGIGRIKEQSARMLGHLVSNAPRLIRPYMEPILKALILKLKDPDPDPNPGVINNVLATIGELAQVSGLEMRKWVDELFIIIMDMLQDSSLLAKRQVALWTLGQLVASTGYVVEPYRKYPTLLEVLLNFLKTEQNQGTRREAIRVLGLLGALDPYKHKVNIGMIDQSRDASAVSLSESKSSQDSSDYSTSEMLVNMGNLPLDEFYPAVSMVALMRIFRDQSLSHHHTMVVQAITFIFKSLGLKCVQFLPQVMPTFLNVIRVCDGAIREFLFQQLGMLVSFVKSHIRPYMDEIVTLMREFWVMNTSIQSTIILLIEQIVVALGGEFKLYLPQLIPHMLRVFMHDNSPGRIVSIKLLAAIQLFGANLDDYLHLLLPPIVKLFDAPEAPLPSRKAALETVDRLTESLDFTDYASRIIHPIVRTLDQSPELRSTAMDTLSSLVFQLGKKYQIFIPMVNKVLVRHRINHQRYDVLICRIVKGYTLADEEEDPLIYQHRMLRSGQGDALASGPVETGPMKKLHVSTINLQKAWGAARRVSKDDWLEWLRRLSLELLKDSSSPSLRSCWALAQAYNPMARDLFNAAFVSCWSELNEDQQDELIRSIELALTSQDIAEVTQTLLNLAEFMEHSDKGPLPLRDDNGIVLLGERAAKCRAYAKALHYKELEFQKGPTPAILESLISINNKLQQPEAAAGVLEYAMKHFGELEIQATWYEKLHEWEDALVAYDKKMDTNKDDPELMLGRMRCLEALGEWGQLHQQCCEKWTLVNDETQAKMARMAAAAAWGLGQWDSMEEYTCMIPRDTHDGAFYRAVLALHQDLFSLAQQCIDKARDLLDAELTAMAGESYSRAYGAMVSCHMLSELEEVIQYKLVPERREIIRQIWWERLQGCQRIVEDWQKILMVRSLVVSPHEDMRTWLKYASLCGKSGRLALAHKTLVLLLGVDPSRQLDHPLPTVHPQVTYAYMKNMWKSARKIDAFQHMQHFVQTMQQQAQHAIATEDQQHKQELHKLMARCFLKLGEWQLNLQGINESTIPKVLQYYSAATEHDRSWYKAWHAWAVMNFEAVLHYKHQNQARDEKKKLRHASGANITNATTAATTAATATTTASTEGSNSESEAESTENSPTPSPLQKKVTEDLSKTLLMYTVPAVQGFFRSISLSRGNNLQDTLRVLTLWFDYGHWPDVNEALVEGVKAIQIDTWLQVIPQLIARIDTPRPLVGRLIHQLLTDIGRYHPQALIYPLTVASKSTTTARHNAANKILKNMCEHSNTLVQQAMMVSEELIRVAILWHEMWHEGLEEASRLYFGERNVKGMFEVLEPLHAMMERGPQTLKETSFNQAYGRDLMEAQEWCRKYMKSGNVKDLTQAWDLYYHVFRRISKQLPQLTSLELQYVSPKLLMCRDLELAVPGTYDPNQPIIRIQSIAPSLQVITSKQRPRKLTLMGSNGHEFVFLLKGHEDLRQDERVMQLFGLVNTLLANDPTSLRKNLSIQRYAVIPLSTNSGLIGWVPHCDTLHALIRDYREKKKILLNIEHRIMLRMAPDYDHLTLMQKVEVFEHAVNNTAGDDLAKLLWLKSPSSEVWFDRRTNYTRSLAVMSMVGYILGLGDRHPSNLMLDRLSGKILHIDFGDCFEVAMTREKFPEKIPFRLTRMLTNAMEVTGLDGNYRITCHTVMEVLREHKDSVMAVLEAFVYDPLLNWRLMDTNTKGNKRSRTRTDSYSAGQSVEILDGVELGEPAHKKTGTTVPESIHSFIGDGLVKPEALNKKAIQIINRVRDKLTGRDFSHDDTLDVPTQVELLIKQATSHENLCQCYIGWCPFW

SEQ ID NO: 66 - DNA, 7650 bp, Homo sapiens
  source: /note="mTor"
atgcttggaaccggacctgccgccgccaccaccgctgccaccacatctagcaatgtgagcgtcctgcagcagtttgccagtggcctaaagagccggaatgaggaaaccagggccaaagccgccaaggagctccagcactatgtcaccatggaactccgagagatgagtcaagaggagtctactcgcttctatgaccaactgaaccatcacatttttgaattggtttccagctcagatgccaatgagaggaaaggtggcatcttggccatagctagcctcataggagtggaaggtgggaatgccacccgaattggcagatttgccaactatcttcggaacctcctcccctccaatgacccagttgtcatggaaatggcatccaaggccattggccgtcttgccatggcaggggacacttttaccgctgagtacgtggaatttgaggtgaagcgagccctggaatggctgggtgctgaccgcaatgagggccggagacatgcagctgtcctggttctccgtgagctggccatcagcgtccctaccttcttcttccagcaagtgcaacccttctttgacaacatttttgtggccgtgtgggaccccaaacaggccatccgtgagggagctgtagccgcccttcgtgcctgtctgattctcacaacccagcgtgagccgaaggagatgcagaagcctcagtggtacaggcacacatttgaagaagcagagaagggatttgatgagaccttggccaaagagaagggcatgaatcgggatgatcggatccatggagccttgttgatccttaacgagctggtccgaatcagcagcatggagggagagcgtctgagagaagaaatggaagaaatcacacagcagcagctggtacacgacaagtactgcaaagatctcatgggcttcggaacaaaacctcgtcacattacccccttcaccagtttccaggctgtacagccccagcagtcaaatgccttggtggggctgctggggtacagctctcaccaaggcctcatgggatttgggacctcccccagtccagctaagtccaccctggtggagagccggtgttgcagagacttgatggaggagaaatttgatcaggtgtgccagtgggtgctgaaatgcaggaatagcaagaactcgctgatccaaatgacaatccttaatttgttgccccgcttggctgcattccgaccttctgccttcacagatacccagtatctccaagataccatgaaccatgtcctaagctgtgtcaagaaggagaaggaacgtacagcggccttccaagccctggggctactttctgtggctgtgaggtctgagtttaaggtctatttgcctcgcgtgctggacatcatccgagcggccctgcccccaaaggacttcgcccataagaggcagaaggcaatgcaggtggatgccacagtcttcacttgcatcagcatgctggctcgagcaatggggccaggcatccagcaggatatcaaggagctgctggagcccatgctggcagtgggactaagccctgccctcactgcagtgctctacgacctgagccgtcagattccacagctaaagaaggacattcaagatgggctactgaaaatgctgtccctggtccttatgcacaaaccccttcgccacccaggcatgcccaagggcctggcccatcagctggcctctcctggcctcacgaccctccctgaggccagcgatgtgggcagcatcactcttgccctccgaacgcttggcagctttgaatttgaaggccactctctgacccaatttgttcgccactgtgcggatcatttcctgaacagtgagcacaaggagatccgcatggaggctgcccgcacctgctcccgcctgctcacaccctccatccacctcatcagtggccatgctcatgtggttagccagaccgcagtgcaagtggtggcagatgtgcttagcaaactgctcgtagttgggataacagatcctgaccctgacattcgctactgtgtcttggcgtccctggacgagcgctttgatgcacacctggcccaggcggagaacttgcaggccttgtttgtggctctgaatgaccaggtgtttgagatccgggagctggccatctgcactgtgggccgactcagtagcatgaaccctgcctttgtcatgcctttcctgcgcaagatgctcatccagattttgacagagttggagcacagtgggattggaagaatcaaagagcagagtgcccgcatgctggggcacctggtctccaatgccccccgactcatccgcccctacatggagcctattctgaaggcattaattttgaaactgaaagatccagaccctgatccaaacccaggtgtgatcaataatgtcctggcaacaataggagaattggcacaggttagtggcctggaaatgaggaaatgggttgatgaactttttattatcatcatggacatgctccaggattcctctttgttggccaaaaggcaggtggctctgtggaccctgggacagttggtggccagcactggctatgtagtagagccctacaggaagtaccctactttgcttgaggtgctactgaattttctgaagactgagcagaaccagggtacacgcagagaggccatccgtgtgttagggcttttaggggctttggatccttacaagcacaaagtgaacattggcatgatagaccagtcccgggatgcctctgctgtcagcctgtcagaatccaagtcaagtcaggattcctctgactatagcactagtgaaatgctggtcaacatgggaaacttgcctctggatgagttctacccagctgtgtccatggtggccctgatgcggatcttccgagaccagtcactctctcatcatcacaccatggttgtccaggccatcaccttcatcttcaagtccctgggactcaaatgtgtgcagttcctgccccaggtcatgcccacgttccttaacgtcattcgagtctgtgatggggccatccgggaatttttgttccagcagctgggaatgttggtgtcctttgtgaagagccacatcagaccttatatggatgaaatagtcaccctcatgagagaattctgggtcatgaacacctcaattcagagcacgatcattcttctcattgagcaaattgtggtagctcttgggggtgaatttaagctctacctgccccagctgatcccacacatgctgcgtgtcttcatgcatgacaacagcccaggccgcattgtctctatcaagttactggctgcaatccagctgtttggcgccaacctggatgactacctgcatttactgctgcctcctattgttaagttgtttgatgcccctgaagctccactgccatctcgaaaggcagcgctagagactgtggaccgcctgacggagtccctggatttcactgactatgcctcccggatcattcaccctattgttcgaacactggaccagagcccagaactgcgctccacagccatggacacgctgtcttcacttgtttttcagctggggaagaagtaccaaattttcattccaatggtgaataaagttctggtgcgacaccgaatcaatcatcagcgctatgatgtgctcatctgcagaattgtcaagggatacacacttgctgatgaagaggaggatcctttgatttaccagcatcggatgcttaggagtggccaaggggatgcattggctagtggaccagtggaaacaggacccatgaagaaactgcacgtcagcaccatcaacctccaaaaggcctggggcgctgccaggagggtctccaaagatgactggctggaatggctgagacggctgagcctggagctgctgaaggactcatcatcgccctccctgcgctcctgctgggccctggcacaggcctacaacccgatggccagggatctcttcaatgctgcatttgtgtcctgctggtctgaactgaatgaagatcaacaggatgagctcatcagaagcatcgagttggccctcacctcacaagacatcgctgaagtcacacagaccctcttaaacttggctgaattcatggaacacagtgacaagggccccctgccactgagagatgacaatggcattgttctgctgggtgagagagctgccaagtgccgagcatatgccaaagcactacactacaaagaactggagttccagaaaggccccacccctgccattctagaatctctcatcagcattaataataagctacagcagccggaggcagcggccggagtgttagaatatgccatgaaacactttggagagctggagatccaggctacctggtatgagaaactgcacgagtgggaggatgcccttgtggcctatgacaagaaaatggacaccaacaaggacgacccagagctgatgctgggccgcatgcgctgcctcgaggccttgggggaatggggtcaactccaccagcagtgctgtgaaaagtggaccctggttaatgatgagacccaagccaagatggcccggatggctgctgcagctgcatggggtttaggtcagtgggacagcatggaagaatacacctgtatgatccctcgggacacccatgatggggcattttatagagctgtgctggcactgcatcaggacctcttctccttggcacaacagtgcattgacaaggccagggacctgctggatgctgaattaactgcgatggcaggagagagttacagtcgggcatatggggccatggtttcttgccacatgctgtccgagctggaggaggttatccagtacaaacttgtccccgagcgacgagagatcatccgccagatctggtgggagagactgcagggctgccagcgtatcgtagaggactggcagaaaatccttatggtgcggtcccttgtggtcagccctcatgaagacatgagaacctggctcaagtatgcaagcctgtgcggcaagagtggcaggctggctcttgctcataaaactttagtgttgctcctgggagttgatccgtctcggcaacttgaccatcctctgccaacagttcaccctcaggtgacctatgcctacatgaaaaacatgtggaagagtgcccgcaagatcgatgccttccagcacatgcagcattttgtccagaccatgcagcaacaggcccagcatgccatcgctactgaggaccagcagcataagcaggaactgcacaagctcatggcccgatgcttcctgaaacttggagagtggcagctgaatctacagggcatcaatgagagcacaatccccaaagtgctgcagtactacagcgccgccacagagcacgaccgcagctggtacaaggcctggcatgcgtgggcagtgatgaacttcgaagctgtgctacactacaaacatcagaaccaagcccgcgatgagaagaagaaactgcgtcatgccagcggggccaacatcaccaacgccaccactgccgccaccacggccgccactgccaccaccactgccagcaccgagggcagcaacagtgagagcgaggccgagagcaccgagaacagccccaccccatcgccgctgcagaagaaggtcactgaggatctgtccaaaaccctcctgatgtacacggtgcctgccgtccagggcttcttccgttccatctccttgtcacgaggcaacaacctccaggatacactcagagttctcaccttatggtttgattatggtcactggccagatgtcaatgaggccttagtggagggggtgaaagccatccagattgatacctggctacaggttatacctcagctcattgcaagaattgatacgcccagacccttggtgggacgtctcattcaccagcttctcacagacattggtcggtaccacccccaggccctcatctacccactgacagtggcttctaagtctaccacgacagcccggcacaatgcagccaacaagattctgaagaacatgtgtgagcacagcaacaccctggtccagcaggccatgatggtgagcgaggagctgatccgagtggccatcctctggcatgagatgtggcatgaaggcctggaagaggcatctcgtttgtactttggggaaaggaacgtgaaaggcatgtttgaggtgctggagcccttgcatgctatgatggaacggggcccccagactctgaaggaaacatcctttaatcaggcctatggtcgagatttaatggaggcccaagagtggtgcaggaagtacatgaaatcagggaatgtcaaggacctcacccaagcctgggacctctattatcatgtgttccgacgaatctcaaagcagctgcctcagctcacatccttagagctgcaatatgtttccccaaaacttctgatgtgccgggaccttgaattggctgtgccaggaacatatgaccccaaccagccaatcattcgcattcagtccatagcaccgtctttgcaagtcatcacatccaagcagaggccccggaaattgacacttatgggcagcaacggacatgagtttgttttccttctaaaaggccatgaagatctgcgccaggatgagcgtgtgatgcagctcttcggcctggttaacacccttctggccaatgacccaacatctcttcggaaaaacctcagcatccagagatacgctgtcatccctttatcgaccaactcgggcctcattggctgggttccccactgtgacacactgcacgccctcatccgggactacagggagaagaagaagatccttctcaacatcgagcatcgcatcatgttgcggatggctccggactatgaccacttgactctgatgcagaaggtggaggtgtttgagcatgccgtcaataatacagctggggacgacctggccaagctgctgtggctgaaaagccccagctccgaggtgtggtttgaccgaagaaccaattatacccgttctttagcggtcatgtcaatggttgggtatattttaggcctgggagatagacacccatccaacctgatgctggaccgtctgagtgggaagatcctgcacattgactttggggactgctttgaggttgctatgacccgagagaagtttccagagaagattccatttagactaacaagaatgttgaccaatgctatggaggttacaggcctggatggcaactacagaatcacatgccacacagtgatggaggtgctgcgagagcacaaggacagtgtcatggccgtgctggaagcctttgtctatgaccccttgctgaactggaggctgatggacacaaataccaaaggcaacaagcgatcccgaacgaggacggattcctactctgctggccagtcagtcgaaattttggacggtgtggaacttggagagccagcccataagaaaacggggaccacagtgccagaatctattcattctttcattggagacggtttggtgaaaccagaggccctaaataagaaagctatccagattattaacagggttcgagataagctcactggtcgggacttctctcatgatgacactttggatgttccaacgcaagttgagctgctcatcaaacaagcgacatcccatgaaaacctctgccagtgctatattggctggtgccctttctggtaa

SEQ ID NO: 67 - protein, 1147 aa, Homo sapiens
  source: /note="SREBP1"
MDEPPFSEAALEQALGEPCDLDAALLTDIEDMLQLINNQDSDFPGLFDPPYAGSGAGGTDPASPDTSSPGSLSPPPATLSSSLEAFLSGPQAAPSPLSPPQPAPTPLKMYPSMPAFSPGPGIKEESVPLSILQTPTPQPLPGALLPQSFPAPAPPQFSSTPVLGYPSPPGGFSTGSPPGNTQQPLPGLPLASPPGVPPVSLHTQVQSVVPQQLLTVTAAPTAAPVTTTVTSQIQQVPVLLQPHFIKADSLLLTAMKTDGATVKAAGLSPLVSGTTVQTGPLPTLVSGGTILATVPLVVDAEKLPINRLAAGSKAPASAQSRGEKRTAHNAIEKRYRSSINDKIIELKDLVVGTEAKLNKSAVLRKAIDYIRFLQHSNQKLKQENLSLRTAVHKSKSLKDLVSACGSGGNTDVLMEGVKTEVEDTLTPPPSDAGSPFQSSPLSLGSRGSGSGGSGSDSEPDSPVFEDSKAKPEQRPSLHSRGMLDRSRLALCTLVFLCLSCNPLASLLGARGLPSPSDTTSVYHSPGRNVLGTESRDGPGWAQWLLPPVVWLLNGLLVLVSLVLLFVYGEPVTRPHSGPAVYFWRHRKQADLDLARGDFAQAAQQLWLALRALGRPLPTSHLDLACSLLWNLIRHLLQRLWVGRWLAGRAGGLQQDCALRVDASASARDAALVYHKLHQLHTMGKHTGGHLTATNLALSALNLAECAGDAVSVATLAEIYVAAALRVKTSLPRALHFLTRFFLSSARQACLAQSGSVPPAMQWLCHPVGHRFFVDGDWSVLSTPWESLYSLAGNPVDPLAQVTQLFREHLLERALNCVTQPNPSPGSADGDKEFSDALGYLQLLNSCSDAAGAPAYSFSISSSMATTTGVDPVAKWWASLTAVVIHWLRRDEEAAERLCPLVEHLPRVLQESERPLPRAALHSFKAARALLGCAKAESGPASLTICEKASGYLQDSLATTPASSSIDKAVQLFLCDLLLVVRTSLWRQQQPPAPAPAAQGTSSRPQASALELRGFQRDLSSLRRLAQSFRPAMRRVFLHEATARLMAGASPTRTHQLLDRSLRRRAGPGGKGGAVAELEPRPTRREHAEALLLASCYLPPGFLSAPGQRVGMLAEAARTLEKLGDRRLLHDCQQMLMRLGGGTTVTSS

SEQ ID NO: 68 - DNA, 3444 bp, Homo sapiens
  source: /note="SREBP1"
atggacgagccacccttcagcgaggcggctttggagcaggcgctgggcgagccgtgcgatctggacgcggcgctgctgaccgacatcgaagacatgcttcagcttatcaacaaccaagacagtgacttccctggcctatttgacccaccctatgctgggagtggggcagggggcacagaccctgccagccccgataccagctccccaggcagcttgtctccacctcctgccacattgagctcctctcttgaagccttcctgagcgggccgcaggcagcgccctcacccctgtcccctccccagcctgcacccactccattgaagatgtacccgtccatgcccgctttctcccctgggcctggtatcaaggaagagtcagtgccactgagcatcctgcagacccccaccccacagcccctgccaggggccctcctgccacagagcttcccagccccagccccaccgcagttcagctccacccctgtgttaggctaccccagccctccgggaggcttctctacaggaagccctcccgggaacacccagcagccgctgcctggcctgccactggcttccccgccaggggtcccgcccgtctccttgcacacccaggtccagagtgtggtcccccagcagctactgacagtcacagctgcccccacggcagcccctgtaacgaccactgtgacctcgcagatccagcaggtcccggtcctgctgcagccccacttcatcaaggcagactcgctgcttctgacagccatgaagacagacggagccactgtgaaggcggcaggtctcagtcccctggtctctggcaccactgtgcagacagggcctttgccgaccctggtgagtggcggaaccatcttggcaacagtcccactggtcgtagatgcggagaagctgcctatcaaccggctcgcagctggcagcaaggccccggcctctgcccagagccgtggagagaagcgcacagcccacaacgccattgagaagcgctaccgctcctccatcaatgacaaaatcattgagctcaaggatctggtggtgggcactgaggcaaagctgaataaatctgctgtcttgcgcaaggccatcgactacattcgctttctgcaacacagcaaccagaaactcaagcaggagaacctaagtctgcgcactgctgtccacaaaagcaaatctctgaaggatctggtgtcggcctgtggcagtggagggaacacagacgtgctcatggagggcgtgaagactgaggtggaggacacactgaccccacccccctcggatgctggctcacctttccagagcagccccttgtcccttggcagcaggggcagtggcagcggtggcagtggcagtgactcggagcctgacagcccagtctttgaggacagcaaggcaaagccagagcagcggccgtctctgcacagccggggcatgctggaccgctcccgcctggccctgtgcacgctcgtcttcctctgcctgtcctgcaaccccttggcctccttgctgggggcccgggggcttcccagcccctcagataccaccagcgtctaccatagccctgggcgcaacgtgctgggcaccgagagcagagatggccctggctgggcccagtggctgctgcccccagtggtctggctgctcaatgggctgttggtgctcgtctccttggtgcttctctttgtctacggtgagccagtcacacggccccactcaggccccgccgtgtacttctggaggcatcgcaagcaggctgacctggacctggcccggggagactttgcccaggctgcccagcagctgtggctggccctgcgggcactgggccggcccctgcccacctcccacctggacctggcttgtagcctcctctggaacctcatccgtcacctgctgcagcgtctctgggtgggccgctggctggcaggccgggcagggggcctgcagcaggactgtgctctgcgagtggatgctagcgccagcgcccgagacgcagccctggtctaccataagctgcaccagctgcacaccatggggaagcacacaggcgggcacctcactgccaccaacctggcgctgagtgccctgaacctggcagagtgtgcaggggatgccgtgtctgtggcgacgctggccgagatctatgtggcggctgcattgagagtgaagaccagtctcccacgggccttgcattttctgacacgcttcttcctgagcagtgcccgccaggcctgcctggcacagagtggctcagtgcctcctgccatgcagtggctctgccaccccgtgggccaccgtttcttcgtggatggggactggtccgtgctcagtaccccatgggagagcctgtacagcttggccgggaacccagtggaccccctggcccaggtgactcagctattccgggaacatctcttagagcgagcactgaactgtgtgacccagcccaaccccagccctgggtcagctgatggggacaaggaattctcggatgccctcgggtacctgcagctgctgaacagctgttctgatgctgcgggggctcctgcctacagcttctccatcagttccagcatggccaccaccaccggcgtagacccggtggccaagtggtgggcctctctgacagctgtggtgatccactggctgcggcgggatgaggaggcggctgagcggctgtgcccgctggtggagcacctgccccgggtgctgcaggagtctgagagacccctgcccagggcagctctgcactccttcaaggctgcccgggccctgctgggctgtgccaaggcagagtctggtccagccagcctgaccatctgtgagaaggccagtgggtacctgcaggacagcctggctaccacaccagccagcagctccattgacaaggccgtgcagctgttcctgtgtgacctgcttcttgtggtgcgcaccagcctgtggcggcagcagcagcccccggccccggccccagcagcccagggcaccagcagcaggccccaggcttccgcccttgagctgcgtggcttccaacgggacctgagcagcctgaggcggctggcacagagcttccggcccgccatgcggagggtgttcctacatgaggccacggcccggctgatggcgggggccagccccacacggacacaccagctcctcgaccgcagtctgaggcggcgggcaggccccggtggcaaaggaggcgcggtggcggagctggagccgcggcccacgcggcgggagcacgcggaggccttgctgctggcctcctgctacctgccccccggcttcctgtcggcgcccgggcagcgcgtgggcatgctggctgaggcggcgcgcacactcgagaagcttggcgatcgccggctgctgcacgactgtcagcagatgctcatgcgcctgggcggtgggaccactgtcacttccagctag

SEQ ID NO: 69 - protein, 138 aa, Homo sapiens
  source: /note="Interferon-gamma"
QDPYVKEAENLKKYFNAGHSDVADNGTLFLGILKNWKEESDRKIMQSQIVSFYFKLFKNFKDDQSIQKSVETIKEDMNVKFFNSNKKKRDDFEKLTNYSVTDLNVQRKAIHELIQVMAELSPAAKTGKRKRSQMLFRG

SEQ ID NO: 70 - DNA, 414 bp, Homo sapiens
  source: /note="Interferon-gamma"
caggacccatatgtaaaagaagcagaaaaccttaagaaatattttaatgcaggtcattcagatgtagcggataatggaactcttttcttaggcattttgaagaattggaaagaggagagtgacagaaaaataatgcagagccaaattgtctccttttacttcaaactttttaaaaactttaaagatgaccagagcatccaaaagagtgtggagaccatcaaggaagacatgaatgtcaagtttttcaatagcaacaaaaagaaacgagatgacttcgaaaagctgactaattattcggtaactgacttgaatgtccaacgcaaagcaatacatgaactcatccaagtgatggctgaactgtcgccagcagctaaaacagggaagcgaaaaaggagtcagatgctgtttcgaggt

SEQ ID NO: 71 - protein, 227 aa, Homo sapiens
  source: /note="Granzyme B"
IIGGHEAKPHSRPYMAYLMIWDQKSLKRCGGFLIRDDFVLTAAHCWGSSINVTLGAHNIKEQEPTQQFIPVKRPIPHPAYNPKNFSNDIMLLQLERKAKRTRAVQPLRLPSNKAQVKPGQTCSVAGWGQTAPLGKHSHTLQEVKMTVQEDRKCESDLRHYYDSTIELCVGDPEIKKTSFKGDSGGPLVCNKVAQGIVSYGRNNGMPPRACTKVSSFVHWIKKTMKRY

SEQ ID NO: 72 - DNA, 681 bp, Homo sapiens
  source: /note="Granzyme B"
atcatcgggggacatgaggccaagccccactcccgcccctacatggcttatcttatgatctgggatcagaagtctctgaagaggtgcggtggcttcctgatacgagacgacttcgtgctgacagctgctcactgttggggaagctccataaatgtcaccttgggggcccacaatatcaaagaacaggagccgacccagcagtttatccctgtgaaaagacccatcccccatccagcctataatcctaagaacttctccaacgacatcatgctactgcagctggagagaaaggccaagcggaccagagctgtgcagcccctcaggctacctagcaacaaggcccaggtgaagccagggcagacatgcagtgtggccggctgggggcagacggcccccctgggaaaacactcacacacactacaagaggtgaagatgacagtgcaggaagatcgaaagtgcgaatctgacttacgccattattacgacagtaccattgagttgtgcgtgggggacccagagattaaaaagacttcctttaagggggactctggaggccctcttgtgtgtaacaaggtggcccagggcattgtctcctatggacgaaacaatggcatgcctccacgagcctgcaccaaagtctcaagctttgtacactggataaagaaaaccatgaaacgctac

SEQ ID NO: 73 - protein, 268 aa, Homo sapiens
  source: /note="PD-1"
PGWFLDSPDRPWNPPTFSPALLVVTEGDNATFTCSFSNTSESFVLNWYRMSPSNQTDKLAAFPEDRSQPGQDCRFRVTQLPNGRDFHMSVVRARRNDSGTYLCGAISLAPKAQIKESLRAELRVTERRAEVPTAHPSPSPRPAGQFQTLVVGVVGGLLGSLVLLVWVLAVICSRAARGTIGARRTGQPLKEDPSAVPVFSVDYGELDFQWREKTPEPPVPCVPEQTEYATIVFPSGMGTSSPARRGSADGPRSAQPLRPEDGHCSWPL

SEQ ID NO: 74 - protein, 272 aa, Homo sapiens
  source: /note="PD-L1"
FTVTVPKDLYVVEYGSNMTIECKFPVEKQLDLAALIVYWEMEDKNIIQFVHGEEDLKVQHSSYRQRARLLKDQLSLGNAALQITDVKLQDAGVYRCMISYGGADYKRITVKVNAPYNKINQRILVVDPVTSEHELTCQAEGYPKAEVIWTSSDHQVLSGKTTTTNSKREEKLFNVTSTLRINTTTNEIFYCTFRRLDPEENHTAELVIPELPLAHPPNERTHLVILGAILLCLGVALTFIFRLRKGRMMDVKKCGIQDTNSKKQSDTHLEET

SEQ ID NO: 75 - protein, 223 aa, Homo sapiens [sequence omitted]

SEQ ID NO: 76 - protein, 311 aa, Homo sapiens
  source: /note="CD1A"
NADGLKEPLSFHVTWIASFYNHSWKQNLVSGWLSDLQTHTWDSNSSTIVFLCPWSRGNFSNEEWKELETLFRIRTIRSFEGIRRYAHELQFEYPFEIQVTGGCELHSGKVSGSFLQLAYQGSDFVSFQNNSWLPYPVAGNMAKHFCKVLNQNQHENDITHNLLSDTCPRFILGLLDAGKAHLQRQVKPEAWLSHGPSPGPGHLQLVCHVSGFYPKPVWVMWMRGEQEQQGTQRGDILPSADGTWYLRATLEVAAGEAADLSCRVKHSSLEGQDIVLYWEHHSSVGFIILAVIVPLLLLIGLALWFRKRCFC

SEQ ID NO: 77 - protein, 279 aa, Homo sapiens
  source: /note="TIM3"
SEVEYRAEVGQNAYLPCFYTPAAPGNLVPVCWGKGACPVFECGNVVLRTDERDVNYWTSRYWLNGDFRKGDVSLTIENVTLADSGIYCCRIQIPGIMNDEKFNLKLVIKPAKVTPAPTRQRDFTAAFPRMLTTRGHGPAETQTLGSLPDINLTQISTLANELRDSRLANDLRDSGATIRIGIYIGAGICAGLALALIFGALIFKWYSHSKEKIQNLSLISLANLPPSGLANAVAEGIRSEENIYTIEENVYEVEEPNEYYCYVSSRQQPSQPLGCRFAM

SEQ ID NO: 78 - protein, 133 aa, Homo sapiens [sequence omitted]

SEQ ID NO: 79 - protein, 152 aa, Homo sapiens
  source: /note="IL-7"
DCDIEGKDGKQYESVLMVSIDQLLDSMKEIGSNCLNNEFNFFKRHICDANKEGMFLFRAARKLRQFLKMNSTGDFDLHLLKVSEGTTILLNCTGQVKGRKPAALGEAQPTKSLEENKSLKEQKKLNDLCFLKRLLQEIKTCWNKILMGTKEH

SEQ ID NO: 80 - protein, 197 aa, Homo sapiens
  source: /note="IL-12alpha"
RNLPVATPDPGMFPCLHHSQNLLRAVSNMLQKARQTLEFYPCTSEEIDHEDITKDKTSTVEACLPLELTKNESCLNSRETSFITNGSCLASRKTSFMMALCLSSIYEDLKMYQVEFKTMNAKLLMDPKRQIFLDQNMLAVIDELMQALNFNSETVPQKSSLEEPDFYKTKIKLCILLHAFRIRAVTIDRVMSYLNAS

SEQ ID NO: 81 - protein, 306 aa, Homo sapiens
  source: /note="IL-12beta"
IWELKKDVYVVELDWYPDAPGEMVVLTCDTPEEDGITWTLDQSSEVLGSGKTLTIQVKEFGDAGQYTCHKGGEVLSHSLLLLHKKEDGIWSTDILKDQKEPKNKTFLRCEAKNYSGRFTCWWLTTISTDLTFSVKSSRGSSDPQGVTCGAATLSAERVRGDNKEYEYSVECQEDSACPAAEESLPIEVMVDAVHKLKYENYTSSFFIRDIIKPDPPKNLQLKPLKNSRQVEVSWEYPDTWSTPHSYFSLTFCVQVQGKSKREKKDRVFTDKTSATVICRKNASISVRAQDRYYSSSWSEWASVPCS

SEQ ID NO: 82 - protein, 114 aa, Homo sapiens
  source: /note="IL-15"
NWVNVISDLKKIEDLIQSMHIDATLYTESDVHPSCKVTAMKCFLLELQVISLESGDASIHDTVENLIILANNSLSSNGNVTESGCKECEELEEKNIKEFLQSFVHIVQMFINTS

SEQ ID NO: 83 - protein, 133 aa, Homo sapiens [sequence omitted]

SEQ ID NO: 84 - protein, 270 aa, Homo sapiens
  source: /note="IL-33"
MKPKMKYSTNKISTAKWKNTASKALCFKLGKSQQKAKEVCPMYFMKLRSGLMIKKEACYFRRETTKRPSLKTGRKHKRHLVLAACQQQSTVECFAFGISGVQKYTRALHDSSITGISPITEYLASLSTYNDQSITFALEDESYEIYVEDLKKDEKKDKVLLSYYESQHPSNESGDGVDGKMLMVTLSPTKDFWLHANNKEHSVELHKCEKPLPDQAFFVLHNMHSNCVSFECKTDPGVFIGVKDNHLALIKVDSSENLCTENILFKLSET

SEQ ID NO: 85 - protein, 696 aa, Artificial Sequence
  source: /note="Description of Artificial Sequence: Synthetic polypeptide"
QIVLTQSPAIMSASPGEKVTMTCSASSSVSYMNWYQQKSGTSPKRWIYDTSKLASGVPAHFRGSGSGTSYSLTISGMEAEDAATYYCQQWSSNPFTFGSGTKLEINRGGGGSGGGGSGGGGSQVQLQQSGAELARPGASVKMSCKASGYTFTRYTMHWVKQRPGQGLEWIGYINPSRGYTNYNQKFKDKATLTTDKSSSTAYMQLSSLTSEDSAVYYCARYYDDHYCLDYWGQGTTLTVSSSGTTNTVAAYNLTWKSTNFKTILEWEPKPVNQVYTVQISTKSGDWKSKCFYTTDTECDLTDEIVKDVKQTYLARVFSYPAGNVESTGSAGEPLYENSPEFTPYLETNLGQPTIQSFEQVGTKVNVTVEDERTLVRRNNTFLSLRDVFGKDLIYTLYYWKSSSSGKKTAKTNTNEFLIDVDKGENYCFSVQAVIPSRTVNRKSTDSPVECMGQEKGEFREVQLQQSGPELVKPGASVKMSCKASGYTFTSYVIQWVKQKPGQGLEWIGSINPYNDYTKYNEKFKGKATLTSDKSSITAYMEFSSLTSEDSALYYCARWGDGNYWGRGTTLTVSSGGGGSGGGGSGGGGSDIEMTQSPAIMSASLGERVTMTCTASSSVSSSYFHWYQQKPGSSPKLCIYSTSNLASGVPPRFSGSGSTSYSLTISSMEAEDAATYFCHQYHRSPTFGGGTKLETKR

SEQ ID NO: 86 - DNA, 2088 bp, Artificial Sequence
  source: /note="Description of Artificial Sequence: Synthetic polynucleotide"
cagatcgtgctgacccaaagccccgccatcatgagcgctagccccggtgagaaggtgaccatgacatgctccgcttccagctccgtgtcctacatgaactggtatcagcagaaaagcggaaccagccccaaaaggtggatctacgacaccagcaagctggcctccggagtgcccgctcatttccggggctctggatccggcaccagctactctttaaccatttccggcatggaagctgaagacgctgccacctactattgccagcaatggagcagcaaccccttcacattcggatctggcaccaagctcgaaatcaatcgtggaggaggtggcagcggcggcggtggatccggcggaggaggaagccaagttcaactccagcagagcggcgctgaactggcccggcccggcgcctccgtcaagatgagctgcaaggcttccggctatacatttactcgttacacaatgcattgggtcaagcagaggcccggtcaaggtttagagtggatcggatatatcaacccttcccggggctacaccaactataaccaaaagttcaaggataaagccactttaaccactgacaagagctcctccaccgcctacatgcagctgtcctctttaaccagcgaggactccgctgtttactactgcgctaggtattacgacgaccactactgtttagactattggggacaaggtaccactttaaccgtcagcagctccggcaccaccaataccgtggccgcttataacctcacatggaagagcaccaacttcaagacaattctggaatgggaacccaagcccgtcaatcaagtttacaccgtgcagatctccaccaaatccggagactggaagagcaagtgcttctacacaacagacaccgagtgtgatttaaccgacgaaatcgtcaaggacgtcaagcaaacctatctggctcgggtcttttcctaccccgctggcaatgtcgagtccaccggctccgctggcgagcctctctacgagaattcccccgaattcaccccttatttagagaccaatttaggccagcctaccatccagagcttcgagcaagttggcaccaaggtgaacgtcaccgtcgaggatgaaaggactttagtgcggcggaataacacatttttatccctccgggatgtgttcggcaaagacctcatctacacactgtactattggaagtccagctcctccggcaaaaagaccgctaagaccaacaccaacgagtttttaattgacgtggacaaaggcgagaactactgcttcagcgtgcaagccgtgatcccttctcgtaccgtcaaccggaagagcacagattcccccgttgagtgcatgggccaagaaaagggcgagttccgggaggtccagctgcagcagagcggacccgaactcgtgaaacccggtgcttccgtgaaaatgtcttgtaaggccagcggatacaccttcacctcctatgtgatccagtgggtcaaacagaagcccggacaaggtctcgagtggatcggcagcatcaacccttacaacgactataccaaatacaacgagaagtttaagggaaaggctactttaacctccgacaaaagctccatcacagcctacatggagttcagctctttaacatccgaggacagcgctctgtactattgcgcccggtggggcgacggcaattactggggacggggcacaacactgaccgtgagcagcggaggcggaggctccggcggaggcggatctggcggtggcggctccgacatcgagatgacccagtcccccgctatcatgtccgcctctttaggcgagcgggtcacaatgacttgtacagcctcctccagcgtctcctcctcctacttccattggtaccaacagaaacccggaagctcccctaaactgtgcatctacagcaccagcaatctcgccagcggcgtgccccctaggttttccggaagcggaagcaccagctactctttaaccatctcctccatggaggctgaggatgccgccacctacttttgtcaccagtaccaccggtcccccaccttcggaggcggcaccaaactggagacaaagagg

SEQ ID NO: 87 - protein, 714 aa, Artificial Sequence
  source: /note="Description of Artificial Sequence: Synthetic polypeptide"
MKWVTFISLLFLFSSAYSQIVLTQSPAIMSASPGEKVTMTCSASSSVSYMNWYQQKSGTSPKRWIYDTSKLASGVPAHFRGSGSGTSYSLTISGMEAEDAATYYCQQWSSNPFTFGSGTKLEINRGGGGSGGGGSGGGGSQVQLQQSGAELARPGASVKMSCKASGYTFTRYTMHWVKQRPGQGLEWIGYINPSRGYTNYNQKFKDKATLTTDKSSSTAYMQLSSLTSEDSAVYYCARYYDDHYCLDYWGQGTTLTVSSSGTTNTVAAYNLTWKSTNFKTILEWEPKPVNQVYTVQISTKSGDWKSKCFYTTDTECDLTDEIVKDVKQTYLARVFSYPAGNVESTGSAGEPLYENSPEFTPYLETNLGQPTIQSFEQVGTKVNVTVEDERTLVRRNNTFLSLRDVFGKDLIYTLYYWKSSSSGKKTAKTNTNEFLIDVDKGENYCFSVQAVIPSRTVNRKSTDSPVECMGQEKGEFREVQLQQSGPELVKPGASVKMSCKASGYTFTSYVIQWVKQKPGQGLEWIGSINPYNDYTKYNEKFKGKATLTSDKSSITAYMEFSSLTSEDSALYYCARWGDGNYWGRGTTLTVSSGGGGSGGGGSGGGGSDIEMTQSPAIMSASLGERVTMTCTASSSVSSSYFHWYQQKPGSSPKLCIYSTSNLASGVPPRFSGSGSTSYSLTISSMEAEDAATYFCHQYHRSPTFGGGTKLETKR

SEQ ID NO: 88 - DNA, 2142 bp, Artificial Sequence
  source: /note="Description of Artificial Sequence: Synthetic polynucleotide"
atgaagtgggtgaccttcatcagcttattatttttattcagctccgcctattcccagatcgtgctgacccaaagccccgccatcatgagcgctagccccggtgagaaggtgaccatgacatgctccgcttccagctccgtgtcctacatgaactggtatcagcagaaaagcggaaccagccccaaaaggtggatctacgacaccagcaagctggcctccggagtgcccgctcatttccggggctctggatccggcaccagctactctttaaccatttccggcatggaagctgaagacgctgccacctactattgccagcaatggagcagcaaccccttcacattcggatctggcaccaagctcgaaatcaatcgtggaggaggtggcagcggcggcggtggatccggcggaggaggaagccaagttcaactccagcagagcggcgctgaactggcccggcccggcgcctccgtcaagatgagctgcaaggcttccggctatacatttactcgttacacaatgcattgggtcaagcagaggcccggtcaaggtttagagtggatcggatatatcaacccttcccggggctacaccaactataaccaaaagttcaaggataaagccactttaaccactgacaagagctcctccaccgcctacatgcagctgtcctctttaaccagcgaggactccgctgtttactactgcgctaggtattacgacgaccactactgtttagactattggggacaaggtaccactttaaccgtcagcagctccggcaccaccaataccgtggccgcttataacctcacatggaagagcaccaacttcaagacaattctggaatgggaacccaagcccgtcaatcaagtttacaccgtgcagatctccaccaaatccggagactggaagagcaagtgcttctacacaacagacaccgagtgtgatttaaccgacgaaatcgtcaaggacgtcaagcaaacctatctggctcgggtcttttcctaccccgctggcaatgtcgagtccaccggctccgctggcgagcctctctacgagaattcccccgaattcaccccttatttagagaccaatttaggccagcctaccatccagagcttcgagcaagttggcaccaaggtgaacgtcaccgtcgaggatgaaaggactttagtgcggcggaataacacatttttatccctccgggatgtgttcggcaaagacctcatctacacactgtactattggaagtccagctcctccggcaaaaagaccgctaagaccaacaccaacgagtttttaattgacgtggacaaaggcgagaactactgcttcagcgtgcaagccgtgatcccttctcgtaccgtcaaccggaagagcacagattcccccgttgagtgcatgggccaagaaaagggcgagttccgggaggtccagctgcagcagagcggacccgaactcgtgaaacccggtgcttccgtgaaaatgtcttgtaaggccagcggatacaccttcacctcctatgtgatccagtgggtcaaacagaagcccggacaaggtctcgagtggatcggcagcatcaacccttacaacgactataccaaatacaacgagaagtttaagggaaaggctactttaacctccgacaaaagctccatcacagcctacatggagttcagctctttaacatccgaggacagcgctctgtactattgcgcccggtggggcgacggcaattactggggacggggcacaacactgaccgtgagcagcggaggcggaggctccggcggaggcggatctggcggtggcggctccgacatcgagatgacccagtcccccgctatcatgtccgcctctttaggcgagcgggtcacaatgacttgtacagcctcctccagcgtctcctcctcctacttccattggtaccaacagaaacccggaagctcccctaaactgtgcatctacagcaccagcaatctcgccagcggcgtgccccctaggttttccggaagcggaagcaccagctactctttaaccatctcctccatggaggctgaggatgccgccacctacttttgtcaccagtaccaccggtcccccaccttcggaggcggcaccaaactggagacaaagagg

SEQ ID NO: 89 - protein, 696 aa, Artificial Sequence
  source: /note="Description of Artificial Sequence: Synthetic polypeptide"
VQLQQSGPELVKPGASVKMSCKASGYTFTSYVIQWVKQKPGQGLEWIGSINPYNDYTKYNEKFKGKATLTSDKSSITAYMEFSSLTSEDSALYYCARWGDGNYWGRGTTLTVSSGGGGSGGGGSGGGGSDIEMTQSPAIMSASLGERVTMTCTASSSVSSSYFHWYQQKPGSSPKLCIYSTSNLASGVPPRFSGSGSTSYSLTISSMEAEDAATYFCHQYHRSPTFGGGTKLETKRSGTTNTVAAYNLTWKSTNFKTILEWEPKPVNQVYTVQISTKSGDWKSKCFYTTDTECDLTDEIVKDVKQTYLARVFSYPAGNVESTGSAGEPLYENSPEFTPYLETNLGQPTIQSFEQVGTKVNVTVEDERTLVRRNNTFLSLRDVFGKDLIYTLYYWKSSSSGKKTAKTNTNEFLIDVDKGENYCFSVQAVIPSRTVNRKSTDSPVECMGQEKGEFREQIVLTQSPAIMSASPGEKVTMTCSASSSVSYMNWYQQKSGTSPKRWIYDTSKLASGVPAHFRGSGSGTSYSLTISGMEAEDAATYYCQQWSSNPFTFGSGTKLEINRGGGGSGGGGSGGGGSQVQLQQSGAELARPGASVKMSCKASGYTFTRYTMHWVKQRPGQGLEWIGYINPSRGYTNYNQKFKDKATLTTDKSSSTAYMQLSSLTSEDSAVYYCARYYDDHYCLDYWGQGTTLTVSS

SEQ ID NO: 90 - DNA, 2088 bp, Artificial Sequence
  source: /note="Description of Artificial Sequence: Synthetic polynucleotide"
gtgcagctgcagcagtccggacccgaactggtcaagcccggtgcctccgtgaaaatgtcttgtaaggcttctggctacacctttacctcctacgtcatccaatgggtgaagcagaagcccggtcaaggtctcgagtggatcggcagcatcaatccctacaacgattacaccaagtataacgaaaagtttaagggcaaggccactctgacaagcgacaagagctccattaccgcctacatggagttttcctctttaacttctgaggactccgctttatactattgcgctcgttggggcgatggcaattattggggccggggaactactttaacagtgagctccggcggcggcggaagcggaggtggaggatctggcggtggaggcagcgacatcgagatgacacagtcccccgctatcatgagcgcctctttaggagaacgtgtgaccatgacttgtacagcttcctccagcgtgagcagctcctatttccactggtaccagcagaaacccggctcctcccctaaactgtgtatctactccacaagcaatttagctagcggcgtgcctcctcgttttagcggctccggcagcacctcttactctttaaccattagctctatggaggccgaagatgccgccacatacttttgccatcagtaccaccggtcccctacctttggcggaggcacaaagctggagaccaagcggagcggcaccaccaacacagtggccgcctacaatctgacttggaaatccaccaacttcaagaccatcctcgagtgggagcccaagcccgttaatcaagtttataccgtgcagatttccaccaagagcggcgactggaaatccaagtgcttctataccacagacaccgagtgcgatctcaccgacgagatcgtcaaagacgtgaagcagacatatttagctagggtgttctcctaccccgctggaaacgtggagagcaccggatccgctggagagcctttatacgagaactcccccgaattcaccccctatctggaaaccaatttaggccagcccaccatccagagcttcgaacaagttggcacaaaggtgaacgtcaccgtcgaagatgagaggactttagtgcggaggaacaatacatttttatccttacgtgacgtcttcggcaaggatttaatctacacactgtattactggaagtctagctcctccggcaagaagaccgccaagaccaataccaacgaatttttaattgacgtggacaagggcgagaactactgcttctccgtgcaagctgtgatcccctcccggacagtgaaccggaagtccaccgactcccccgtggagtgcatgggccaagagaagggagagtttcgtgagcagatcgtgctgacccagtcccccgctattatgagcgctagccccggtgaaaaggtgactatgacatgcagcgccagctcttccgtgagctacatgaactggtatcagcagaagtccggcaccagccctaaaaggtggatctacgacaccagcaagctggccagcggcgtccccgctcactttcggggctccggctccggaacaagctactctctgaccatcagcggcatggaagccgaggatgccgctacctattactgtcagcagtggagctccaaccccttcacctttggatccggcaccaagctcgagattaatcgtggaggcggaggtagcggaggaggcggatccggcggtggaggtagccaagttcagctccagcaaagcggcgccgaactcgctcggcccggcgcttccgtgaagatgtcttgtaaggcctccggctataccttcacccggtacacaatgcactgggtcaagcaacggcccggtcaaggtttagagtggattggctatatcaacccctcccggggctataccaactacaaccagaagttcaaggacaaagccaccctcaccaccgacaagtccagcagcaccgcttacatgcagctgagctctttaacatccgaggattccgccgtgtactactgcgctcggtactacgacgatcattactgcctcgattactggggccaaggtaccaccttaacagtctcctcc

SEQ ID NO: 91 - protein, 714 aa, Artificial Sequence
  source: /note="Description of Artificial Sequence: Synthetic polypeptide"
MKWVTFISLLFLFSSAYSVQLQQSGPELVKPGASVKMSCKASGYTFTSYVIQWVKQKPGQGLEWIGSINPYNDYTKYNEKFKGKATLTSDKSSITAYMEFSSLTSEDSALYYCARWGDGNYWGRGTTLTVSSGGGGSGGGGSGGGGSDIEMTQSPAIMSASLGERVTMTCTASSSVSSSYFHWYQQKPGSSPKLCIYSTSNLASGVPPRFSGSGSTSYSLTISSMEAEDAATYFCHQYHRSPTFGGGTKLETKRSGTTNTVAAYNLTWKSTNFKTILEWEPKPVNQVYTVQISTKSGDWKSKCFYTTDTECDLTDEIVKDVKQTYLARVFSYPAGNVESTGSAGEPLYENSPEFTPYLETNLGQPTIQSFEQVGTKVNVTVEDERTLVRRNNTFLSLRDVFGKDLIYTLYYWKSSSSGKKTAKTNTNEFLIDVDKGENYCFSVQAVIPSRTVNRKSTDSPVECMGQEKGEFREQIVLTQSPAIMSASPGEKVTMTCSASSSVSYMNWYQQKSGTSPKRWIYDTSKLASGVPAHFRGSGSGTSYSLTISGMEAEDAATYYCQQWSSNPFTFGSGTKLEINRGGGGSGGGGSGGGGSQVQLQQSGAELARPGASVKMSCKASGYTFTRYTMHWVKQRPGQGLEWIGYINPSRGYTNYNQKFKDKATLTTDKSSSTAYMQLSSLTSEDSAVYYCARYYDDHYCLDYWGQGTTLTVSS

SEQ ID NO: 92 - DNA, 2142 bp, Artificial Sequence
  source: /note="Description of Artificial Sequence: Synthetic polynucleotide"
atgaaatgggtcaccttcatctctttactgtttttatttagcagcgcctacagcgtgcagctgcagcagtccggacccgaactggtcaagcccggtgcctccgtgaaaatgtcttgtaaggcttctggctacacctttacctcctacgtcatccaatgggtgaagcagaagcccggtcaaggtctcgagtggatcggcagcatcaatccctacaacgattacaccaagtataacgaaaagtttaagggcaaggccactctgacaagcgacaagagctccattaccgcctacatggagttttcctctttaacttctgaggactccgctttatactattgcgctcgttggggcgatggcaattattggggccggggaactactttaacagtgagctccggcggcggcggaagcggaggtggaggatctggcggtggaggcagcgacatcgagatgacacagtcccccgctatcatgagcgcctctttaggagaacgtgtgaccatgacttgtacagcttcctccagcgtgagcagctcctatttccactggtaccagcagaaacccggctcctcccctaaactgtgtatctactccacaagcaatttagctagcggcgtgcctcctcgttttagcggctccggcagcacctcttactctttaaccattagctctatggaggccgaagatgccgccacatacttttgccatcagtaccaccggtcccctacctttggcggaggcacaaagctggagaccaagcggagcggcaccaccaacacagtggccgcctacaatctgacttggaaatccaccaacttcaagaccatcctcgagtgggagcccaagcccgttaatcaagtttataccgtgcagatttccaccaagagcggcgactggaaatccaagtgcttctataccacagacaccgagtgcgatctcaccgacgagatcgtcaaagacgtgaagcagacatatttagctagggtgttctcctaccccgctggaaacgtggagagcaccggatccgctggagagcctttatacgagaactcccccgaattcaccccctatctggaaaccaatttaggccagcccaccatccagagcttcgaacaagttggcacaaaggtgaacgtcaccgtcgaagatgagaggactttagtgcggaggaacaatacatttttatccttacgtgacgtcttcggcaaggatttaatctacacactgtattactggaagtctagctcctccggcaagaagaccgccaagaccaataccaacgaatttttaattgacgtggacaagggcgagaactactgcttctccgtgcaagctgtgatcccctcccggacagtgaaccggaagtccaccgactcccccgtggagtgcatgggccaagagaagggagagtttcgtgagcagatcgtgctgacccagtcccccgctattatgagcgctagccccggtgaaaaggtgactatgacatgcagcgccagctcttccgtgagctacatgaactggtatcagcagaagtccggcaccagccctaaaaggtggatctacgacaccagcaagctggccagcggcgtccccgctcactttcggggctccggctccggaacaagctactctctgaccatcagcggcatggaagccgaggatgccgctacctattactgtcagcagtggagctccaaccccttcacctttggatccggcaccaagctcgagattaatcgtggaggcggaggtagcggaggaggcggatccggcggtggaggtagccaagttcagctccagcaaagcggcgccgaactcgctcggcccggcgcttccgtgaagatgtcttgtaaggcctccggctataccttcacccggtacacaatgcactgggtcaagcaacggcccggtcaaggtttagagtggattggctatatcaacccctcccggggctataccaactacaaccagaagttcaaggacaaagccaccctcaccaccgacaagtccagcagcaccgcttacatgcagctgagctctttaacatccgaggattccgccgtgtactactgcgctcggtactacgacgatcattactgcctcgattactggggccaaggtaccaccttaacagtctcctcc

SEQ ID NO: 93 - protein, 219 aa, Homo sapiens
  source: /note="Tissue factor"
SGTTNTVAAYNLTWKSTNFKTILEWEPKPVNQVYTVQISTKSGDWKSKCFYTTDTECDLTDEIVKDVKQTYLARVFSYPAGNVESTGSAGEPLYENSPEFTPYLETNLGQPTIQSFEQVGTKVNVTVEDERTLVRRNNTFLSLRDVFGKDLIYTLYYWKSSSSGKKTAKTNTNEFLIDVDKGENYCFSVQAVIPSRTVNRKSTDSPVECMGQEKGEFRE

SEQ ID NO: 94 - DNA, 657 bp, Homo sapiens
  source: /note="Tissue factor"
agcggcacaaccaacacagtcgctgcctataacctcacttggaagagcaccaacttcaaaaccatcctcgaatgggaacccaaacccgttaaccaagtttacaccgtgcagatcagcaccaagtccggcgactggaagtccaaatgtttctataccaccgacaccgagtgcgatctcaccgatgagatcgtgaaagatgtgaaacagacctacctcgcccgggtgtttagctaccccgccggcaatgtggagagcactggttccgctggcgagcctttatacgagaacagccccgaatttaccccttacctcgagaccaatttaggacagcccaccatccaaagctttgagcaagttggcacaaaggtgaatgtgacagtggaggacgagcggactttagtgcggcggaacaacacctttctcagcctccgggatgtgttcggcaaagatttaatctacacactgtattactggaagtcctcttcctccggcaagaagacagctaaaaccaacacaaacgagtttttaatcgacgtggataaaggcgaaaactactgtttcagcgtgcaagctgtgatcccctcccggaccgtgaataggaaaagcaccgatagccccgttgagtgcatgggccaagaaaagggcgagttccgggag

SEQ ID NO: 95 - protein, 223 aa, Mus musculus
  source: /note="Tissue factor"
AGIPEKAFNLTWISTDFKTILEWQPKPTNYTYTVQISDRSRNWKNKCFSTTDTECDLTDEIVKDVTWAYEAKVLSVPRRNSVHGDGDQLVIHGEEPPFTNAPKFLPYRDTNLGQPVIQQFEQDGRKLNVVVKDSLTLVRKNGTFLTLRQVFGKDLGYIITYRKGSSTGKKTNITNTNEFSIDVEEGVSYCFFVQAMIFSRKTNQNSPGSSTVCTEQWKSFLGE

SEQ ID NO: 96 - protein, 224 aa, Rattus rattus
  source: /note="Tissue factor"
AGTPPGKAFNLTWISTDFKTILEWQPKPTNYTYTVQISDRSRNWKYKCTGTTDTECDLTDEIVKDVNWTYEARVLSVPWRNSTHGKETLFGTHGEEPPFTNARKFLPYRDTKIGQPVIQKYEQGGTKLKVTVKDSFTLVRKNGTFLTLRQVFGNDLGYILTYRKDSSTGRKTNTTHTNEFLIDVEKGVSYCFFAQAVIFSRKTNHKSPESITKCTEQWKSVLGE

SEQ ID NO: 97 - protein, 219 aa, Homo sapiens
  source: /note="Tissue factor"
SGTTNTVAAYNLTWKSTNFATALEWEPKPVNQVYTVQISTKSGDWKSKCFYTTDTECALTDEIVKDVKQTYLARVFSYPAGNVESTGSAGEPLYENSPEFTPYLETNLGQPTIQSFEQVGTKVNVTVEDERTLVARNNTALSLRDVFGKDLIYTLYYWKSSSSGKKTAKTNTNEFLIDVDKGENYCFSVQAVIPSRTVNRKSTDSPVECMGQEKGEFRE

SEQ ID NO: 98 - protein, 219 aa, Homo sapiens
  source: /note="Tissue factor"
SGTTNTVAAYNLTWKSTNFATALEWEPKPVNQVYTVQISTKSGDAKSKCFYTTDTECALTDEIVKDVKQTYLARVFSYPAGNVESTGSAGEPLAENSPEFTPYLETNLGQPTIQSFEQVGTKVNVTVEDERTLVARNNTALSLRDVFGKDLIYTLYYWKSSSSGKKTAKTNTNEFLIDVDKGENYCFSVQAVIPSRTVNRKSTDSPVECMGQEKGEFRE

SEQ ID NO: 99 - protein, 4 aa, Artificial Sequence
  source: /note="Description of Artificial Sequence: Synthetic peptide"
GGGS

SEQ ID NO: 100 - protein, 5 aa, Artificial Sequence
  source: /note="Description of Artificial Sequence: Synthetic peptide"
GGGGS

SEQ ID NO: 101 - protein, 4 aa, Artificial Sequence
  source: /note="Description of Artificial Sequence: Synthetic peptide"
GGSG

SEQ ID NO: 102 - protein, 15 aa, Artificial Sequence
  source: /note="Description of Artificial Sequence: Synthetic peptide"
GGGGSGGGGSGGGGS

SEQ ID NO: 103 - DNA, 45 bp, Artificial Sequence
  source: /note="Description of Artificial Sequence: Synthetic oligonucleotide"
ggcggtggaggatccggaggaggtggctccggcggcggaggatct

SEQ ID NO: 104 - protein, 8 aa, Artificial Sequence
  source: /note="Description of Artificial Sequence: Synthetic peptide"
GGGSGGGS

SEQ ID NO: 105 - protein, 133 aa, Homo sapiens
  source: /note="IL-3"
APMTQTTPLKTSWVNCSNMIDEIITHLKQPPLPLLDFNNLNGEDQDILMENNLRRPNLEAFNRAVKSLQNASAIESILKNLLPCLPLATAAPTRHPIHIKDGDWNEFRRKLTFYLKTLENAQAQQTTLSLAIF

SEQ ID NO: 106 - protein, 79 aa, Homo sapiens
  source: /note="IL-8"
EGAVLPRSAKELRCQCIKTYSKPFHPKFIKELRVIESGPHCANTEIIVKLSDGRELCLDPKENWVQRVVEKFLKRAENS

SEQ ID NO: 107 - protein, 160 aa, Homo sapiens
  source: /note="IL-10"
SPGQGTQSENSCTHFPGNLPNMLRDLRDAFSRVKTFFQMKDQLDNLLLKESLLEDFKGYLGCQALSEMIQFYLEEVMPQAENQDPDIKAHVNSLGENLKTLRLRLRRCHRFLPCENKSKAVEQVKNAFNKLQEKGIYKAMSEFDIFINYIEAYMTMKIRN

SEQ ID NO: 108 - protein, 132 aa, Homo sapiens
  source: /note="IL-17"
GITIPRNPGCPNSEDKNFPRTVMVNLNIHNRNTNTNPKRSSDYYNRSTSPWNLHRNEDPERYPSVIWEAKCRHLGCINADGNVDYHMNSVPIQQEILVLRREPPHCPNSFRLEKILVSVGCTCVTPIVHHVA

SEQ ID NO: 109 - protein, 157 aa, Homo sapiens
  source: /note="IL-18"
YFGKLESKLSVIRNLNDQVLFIDQGNRPLFEDMTDSDCRDNAPRTIFIISMYKDSQPRGMAVTISVKCEKISTLSCENKIISFKEMNPPDNIKDTKSDIIFFQRSVPGHDNKMQFESSSYEGYFLACEKERDLFKLILKKEDELGDRSIMFTVQNED

SEQ ID NO: 110 - protein, 352 aa, Homo sapiens
  source: /note="PDGF-DD"
RDTSATPQSASIKALRNANLRRDESNHLTDLYRRDETIQVKGNGYVQSPRFPNSYPRNLLLTWRLHSQENTRIQLVFDNQFGLEEAENDICRYDFVEVEDISETSTIIRGRWCGHKEVPPRIKSRTNQIKITFKSDDYFVAKPGFKIYYSLLEDFQPAAASETNWESVTSSISGVSYNSPSVTDPTLIADALDKKIAEFDTVEDLLKYFNPESWQEDLENMYLDTPRYRGRSYHDRKSKVDLDRLNDDAKRYSCTPRNYSVNIREELKLANVVFFPRCLLVQRCGGNCGCGTVNWRSCTCNSGKTVKKYHEVLQFEPGHIKRRGRAKTMALVDIQLDHHERCDCICSSRPPR

SEQ ID NO: 111 - protein, 248 aa, Homo sapiens
  source: /note="SCF"
EGICRNRVTNNVKDVTKLVANLPKDYMITLKYVPGMDVLPSHCWISEMVVQLSDSLTDLLDKFSNISEGLSNYSIIDKLVNIVDDLVECVKENSSKDLKKSFKSPEPRLFTPEEFFRIFNRSIDAFKDFVVASETSDCVVSSTLSPEKDSRVSVTKPFMLPPVAASSLRNDSSSSNRKAKNPPGDSSLHWAAMALPALFSLIIGFAFGALYWKKRQPSLTRAVENIQINEEDNEISMLQEKEREFQEV

SEQ ID NO: 112 - protein, 209 aa, Homo sapiens
  source: /note="FLT3L"
TQDCSFQHSPISSDFAVKIRELSDYLLQDYPVTVASNLQDEELCGGLWRLVLAQRWMERLKTVAGSKMQGLLERVNTEIHFVTKCAFQPPPSCLRFVQTNISRLLQETSEQLVALKPWITRQNFSRCLELQCQPDSSTLPPPWSPRPLEATAPTAPQPPLLLLLLLPVGLLLLAAAWCLHWQRTRRRTPRPGEQVPPVPSPQDLLLVEH

SEQ ID NO: 113 - protein, 65 aa, Homo sapiens
  source: /note="IL15Ralpha"
ITCPPPMSVEHADIWVKSYSLYSRERYICNSGFKRKAGTSSLTECVLNKATNVAHWTTPSLKCIR

SEQ ID NO: 114 - DNA, 195 bp, Homo sapiens
  source: /note="IL15Ralpha"
attacatgcccccctcccatgagcgtggagcacgccgacatctgggtgaagagctatagcctctacagccgggagaggtatatctgtaacagcggcttcaagaggaaggccggcaccagcagcctcaccgagtgcgtgctgaataaggctaccaacgtggctcactggacaacaccctctttaaagtgcatccgg

SEQ ID NO: 115 - protein, 114 aa, Homo sapiens; identical to SEQ ID NO: 82
  source: /note="IL-15"

SEQ ID NO: 116 - DNA, 342 bp, Homo sapiens
  source: /note="IL-15"
aactgggtgaacgtcatcagcgatttaaagaagatcgaagatttaattcagtccatgcatatcgacgccactttatacacagaatccgacgtgcacccctcttgtaaggtgaccgccatgaaatgttttttactggagctgcaagttatctctttagagagcggagacgctagcatccacgacaccgtggagaatttaatcattttagccaataactctttatccagcaacggcaacgtgacagagtccggctgcaaggagtgcgaagagctggaggagaagaacatcaaggagtttctgcaatcctttgtgcacattgtccagatgttcatcaatacctcc

SEQ ID NO: 117 - protein, 18 aa, Artificial Sequence
  source: /note="Description of Artificial Sequence: Synthetic Signal sequence"
MKWVTFISLLFLFSSAYS

SEQ ID NO: 118 - DNA, 54 bp, Artificial Sequence
  source: /note="Description of Artificial Sequence: Synthetic Signal sequence"
atgaaatgggtgacctttatttctttactgttcctctttagcagcgcctactcc

SEQ ID NO: 119 - DNA, 54 bp, Artificial Sequence
  source: /note="Description of Artificial Sequence: Synthetic Signal sequence"
atgaagtgggtcacatttatctctttactgttcctcttctccagcgcctacagc

SEQ ID NO: 120 - DNA, 54 bp, Artificial Sequence; identical to SEQ ID NO: 118
  source: /note="Description of Artificial Sequence: Synthetic Signal sequence"

SEQ ID NO: 121 - protein, 16 aa, Artificial Sequence
  source: /note="Description of Artificial Sequence: Synthetic Signal sequence"
MKCLLYLAFLFLGVNC

SEQ ID NO: 122 - protein, 58 aa, Artificial Sequence
  source: /note="Description of Artificial Sequence: Synthetic Signal sequence"
MGQIVTMFEALPHIIDEVINIVIIVLIIITSIKAVYNFATCGILALVSFLFLAGRSCG

SEQ ID NO: 123 - protein, 97 aa, Artificial Sequence
  source: /note="Description of Artificial Sequence: Synthetic Signal sequence"
MPNHQSGSPTGSSDLLLSGKKQRPHLALRRKRRREMRKINRKVRRMNLAPIKEKTAWQHLQALISEAEEVLKTSQTPQNSLTLFLALLSVLGPPVTG

SEQ ID NO: 124 - protein, 30 aa, Artificial Sequence
  source: /note="Description of Artificial Sequence: Synthetic Signal sequence"
MDSKGSSQKGSRLLLLLVVSNLLLCQGVVS

SEQ ID NO: 125 - protein, 16 aa, Artificial Sequence
  source: /note="Description of Artificial Sequence: Synthetic Signal sequence"
MKCLLYLAFLFLGVNC

SEQ ID NO: 126 - protein, 15 aa, Artificial Sequence
  source: /note="Description of Artificial Sequence: Synthetic peptide"
GLNDIFEAQKIEWHE

SEQ ID NO: 127 - protein, 26 aa, Artificial Sequence
  source: /note="Description of Artificial Sequence: Synthetic peptide"
KRRWKKNFIAVSAANRFKKISSSGAL

SEQ ID NO: 128 - protein, 6 aa, Artificial Sequence
  source: /note="Description of Artificial Sequence: Synthetic peptide"
EEEEEE

SEQ ID NO: 129 - protein, 13 aa, Artificial Sequence
  source: /note="Description of Artificial Sequence: Synthetic peptide"
GAPVPYPDPLEPR

SEQ ID NO: 130 - protein, 8 aa, Artificial Sequence
  source: /note="Description of Artificial Sequence: Synthetic peptide"
DYKDDDDK

SEQ ID NO: 131 - protein, 9 aa, Artificial Sequence
  source: /note="Description of Artificial Sequence: Synthetic peptide"
YPYDVPDYA

SEQ ID NO: 132 - protein, 5 aa, Artificial Sequence
  source: /note="Description of Artificial Sequence: Synthetic peptide"
HHHHH

SEQ ID NO: 133 - protein, 6 aa, Artificial Sequence
  source: /note="Description of Artificial Sequence: Synthetic peptide"
HHHHHH

SEQ ID NO: 134 - protein, 7 aa, Artificial Sequence
  source: /note="Description of Artificial Sequence: Synthetic peptide"
HHHHHHH

SEQ ID NO: 135 - protein, 8 aa, Artificial Sequence
  source: /note="Description of Artificial Sequence: Synthetic peptide"
HHHHHHHH

SEQ ID NO: 136 - protein, 9 aa, Artificial Sequence
  source: /note="Description of Artificial Sequence: Synthetic peptide"
HHHHHHHHH

SEQ ID NO: 137 - protein, 10 aa, Artificial Sequence
  source: /note="Description of Artificial Sequence: Synthetic peptide"
HHHHHHHHHH

SEQ ID NO: 138 - protein, 10 aa, Artificial Sequence
  source: /note="Description of Artificial Sequence: Synthetic peptide"
EQKLISEEDL

SEQ ID NO: 139 - protein, 18 aa, Artificial Sequence
  source: /note="Description of Artificial Sequence: Synthetic peptide"
TKENPRSNQEESYDDNES

SEQ ID NO: 140 - protein, 15 aa, Artificial Sequence
  source: /note="Description of Artificial Sequence: Synthetic peptide"
KETAAAKFERQHMDS

SEQ ID NO: 141 - protein, 38 aa, Artificial Sequence
  source: /note="Description of Artificial Sequence: Synthetic polypeptide"
MDEKTTGWRGGHVVEGLAGELEQLRARLEHHPQGQREP

SEQ ID NO: 142 - protein, 13 aa, Artificial Sequence
  source: /note="Description of Artificial Sequence: Synthetic peptide"
SLAELLNAGLGGS

SEQ ID NO: 143 - protein, 8 aa, Artificial Sequence
  source: /note="Description of Artificial Sequence: Synthetic peptide"
TQDPSRVG

SEQ ID NO: 144 - protein, 12 aa, Artificial Sequence
  source: /note="Description of Artificial Sequence: Synthetic peptide"
PDRVRAVSHWSS

SEQ ID NO: 145 - protein, 8 aa, Artificial Sequence
  source: /note="Description of Artificial Sequence: Synthetic peptide"
WSHPQFEK

SEQ ID NO: 146 - protein, 6 aa, Artificial Sequence
  source: /note="Description of Artificial Sequence: Synthetic peptide"
CCPGCC

SEQ ID NO: 147 - protein, 10 aa, Artificial Sequence
  source: /note="Description of Artificial Sequence: Synthetic 7t15-7s sequence"
EVHTNQDPLD

SEQ ID NO: 148 - protein, 14 aa, Artificial Sequence
  source: /note="Description of Artificial Sequence: Synthetic peptide"
GKPIPNPLLGLDST

SEQ ID NO: 149 - protein, 11 aa, Artificial Sequence
  source: /note="Description of Artificial Sequence: Synthetic peptide"
YTDIEMNRLGK

SEQ ID NO: 150 - protein, 8 aa, Artificial Sequence
  source: /note="Description of Artificial Sequence: Synthetic peptide"
DLYDDDDK

SEQ ID NO: 151 - protein, 241 aa, Homo sapiens
  source: /note="CD3"
QIVLTQSPAIMSASPGEKVTMTCSASSSVSYMNWYQQKSGTSPKRWIYDTSKLASGVPAHFRGSGSGTSYSLTISGMEAEDAATYYCQQWSSNPFTFGSGTKLEINRGGGGSGGGGSGGGGSQVQLQQSGAELARPGASVKMSCKASGYTFTRYTMHWVKQRPGQGLEWIGYINPSRGYTNYNQKFKDKATLTTDKSSSTAYMQLSSLTSEDSAVYYCARYYDDHYCLDYWGQGTTLTVSS

SEQ ID NO: 152 - DNA, 723 bp, Homo sapiens
  source: /note="CD3"
cagatcgtgctgacccaaagccccgccatcatgagcgctagccccggtgagaaggtgaccatgacatgctccgcttccagctccgtgtcctacatgaactggtatcagcagaaaagcggaaccagccccaaaaggtggatctacgacaccagcaagctggcctccggagtgcccgctcatttccggggctctggatccggcaccagctactctttaaccatttccggcatggaagctgaagacgctgccacctactattgccagcaatggagcagcaaccccttcacattcggatctggcaccaagctcgaaatcaatcgtggaggaggtggcagcggcggcggtggatccggcggaggaggaagccaagttcaactccagcagagcggcgctgaactggcccggcccggcgcctccgtcaagatgagctgcaaggcttccggctatacatttactcgttacacaatgcattgggtcaagcagaggcccggtcaaggtttagagtggatcggatatatcaacccttcccggggctacaccaactataaccaaaagttcaaggataaagccactttaaccactgacaagagctcctccaccgcctacatgcagctgtcctctttaaccagcgaggactccgctgtttactactgcgctaggtattacgacgaccactactgtttagactattggggacaaggtaccactttaaccgtcagcagc

SEQ ID NO: 153 - protein, 236 aa, Homo sapiens
  source: /note="CD28"
VQLQQSGPELVKPGASVKMSCKASGYTFTSYVIQWVKQKPGQGLEWIGSINPYNDYTKYNEKFKGKATLTSDKSSITAYMEFSSLTSEDSALYYCARWGDGNYWGRGTTLTVSSGGGGSGGGGSGGGGSDIEMTQSPAIMSASLGERVTMTCTASSSVSSSYFHWYQQKPGSSPKLCIYSTSNLASGVPPRFSGSGSTSYSLTISSMEAEDAATYFCHQYHRSPTFGGGTKLETKR

SEQ ID NO: 154 - DNA, 708 bp, Homo sapiens
  source: /note="CD28"
gtccagctgcagcagagcggacccgaactcgtgaaacccggtgcttccgtgaaaatgtcttgtaaggccagcggatacaccttcacctcctatgtgatccagtgggtcaaacagaagcccggacaaggtctcgagtggatcggcagcatcaacccttacaacgactataccaaatacaacgagaagtttaagggaaaggctactttaacctccgacaaaagctccatcacagcctacatggagttcagctctttaacatccgaggacagcgctctgtactattgcgcccggtggggcgacggcaattactggggacggggcacaacactgaccgtgagcagcggaggcggaggctccggcggaggcggatctggcggtggcggctccgacatcgagatgacccagtcccccgctatcatgtccgcctctttaggcgagcgggtcacaatgacttgtacagcctcctccagcgtctcctcctcctacttccattggtaccaacagaaacccggaagctcccctaaactgtgcatctacagcaccagcaatctcgccagcggcgtgccccctaggttttccggaagcggaagcaccagctactctttaaccatctcctccatggaggctgaggatgccgccacctacttttgtcaccagtaccaccggtcccccaccttcggaggcggcaccaaactggagacaaagagg

SEQ ID NO: 155 - protein, 696 aa, Artificial Sequence; identical to SEQ ID NO: 85
  source: /note="Description of Artificial Sequence: Synthetic 3t28 sequence"

SEQ ID NO: 156 - DNA, 2088 bp, Artificial Sequence; identical to SEQ ID NO: 86
  source: /note="Description of Artificial Sequence: Synthetic 3t28 sequence"

SEQ ID NO: 157 - protein, 714 aa, Artificial Sequence; identical to SEQ ID NO: 87
  source: /note="Description of Artificial Sequence: Synthetic 3t28 sequence"

SEQ ID NO: 158 - DNA, 2142 bp, Artificial Sequence; identical to SEQ ID NO: 88
  source: /note="Description of Artificial Sequence: Synthetic 3t28 sequence"

SEQ ID NO: 159 - DNA, 399 bp, Homo sapiens
  source: /note="IL-2"
gcacctacttcaagttctacaaagaaaacacagctacaactggagcatttactgctggatttacagatgattttgaatggaattaataattacaagaatcccaaactcaccaggatgctcacatttaagttttacatgcccaagaaggccacagaactgaaacatcttcagtgtctagaagaagaactcaaacctctggaggaagtgctaaatttagctcaaagcaaaaactttcacttaagacccagggacttaatcagcaatatcaacgtaatagttctggaactaaagggatctgaaacaacattcatgtgtgaatatgctgatgagacagcaaccattgtagaatttctgaacagatggattaccttttgtcaaagcatcatctcaacactaact

SEQ ID NO: 160 - DNA, 399 bp, Homo sapiens
  source: /note="IL-2"
gcccccacctcctcctccaccaagaagacccagctgcagctggagcatttactgctggatttacagatgattttaaacggcatcaacaactacaagaaccccaagctgactcgtatgctgaccttcaagttctacatgcccaagaaggccaccgagctgaagcatttacagtgtttagaggaggagctgaagcccctcgaggaggtgctgaatttagcccagtccaagaatttccatttaaggccccgggatttaatcagcaacatcaacgtgatcgttttagagctgaagggctccgagaccaccttcatgtgcgagtacgccgacgagaccgccaccatcgtggagtttttaaatcgttggatcaccttctgccagtccatcatctccactttaacc

SEQ ID NO: 161 - protein, 485 aa, Artificial Sequence
  source: /note="Description of Artificial Sequence: Synthetic 2t2 sequence"
APTSSSTKKTQLQLEHLLLDLQMILNGINNYKNPKLTRMLTFKFYMPKKATELKHLQCLEEELKPLEEVLNLAQSKNFHLRPRDLISNINVIVLELKGSETTFMCEYADETATIVEFLNRWITFCQSIISTLTSGTTNTVAAYNLTWKSTNFKTILEWEPKPVNQVYTVQISTKSGDWKSKCFYTTDTECDLTDEIVKDVKQTYLARVFSYPAGNVESTGSAGEPLYENSPEFTPYLETNLGQPTIQSFEQVGTKVNVTVEDERTLVRRNNTFLSLRDVFGKDLIYTLYYWKSSSSGKKTAKTNTNEFLIDVDKGENYCFSVQAVIPSRTVNRKSTDSPVECMGQEKGEFREAPTSSSTKKTQLQLEHLLLDLQMILNGINNYKNPKLTRMLTFKFYMPKKATELKHLQCLEEELKPLEEVLNLAQSKNFHLRPRDLISNINVIVLELKGSETTFMCEYADETATIVEFLNRWITFCQSIISTLT

SEQ ID NO: 162 - DNA, 1455 bp, Artificial Sequence
  source: /note="Description of Artificial Sequence: Synthetic 2t2 sequence"
gcccccacctcctcctccaccaagaagacccagctgcagctggagcatttactgctggatttacagatgattttaaacggcatcaacaactacaagaaccccaagctgactcgtatgctgaccttcaagttctacatgcccaagaaggccaccgagctgaagcatttacagtgtttagaggaggagctgaagcccctcgaggaggtgctgaatttagcccagtccaagaatttccatttaaggccccgggatttaatcagcaacatcaacgtgatcgttttagagctgaagggctccgagaccaccttcatgtgcgagtacgccgacgagaccgccaccatcgtggagtttttaaatcgttggatcaccttctgccagtccatcatctccactttaaccagcggcacaaccaacacagtcgctgcctataacctcacttggaagagcaccaacttcaaaaccatcctcgaatgggaacccaaacccgttaaccaagtttacaccgtgcagatcagcaccaagtccggcgactggaagtccaaatgtttctataccaccgacaccgagtgcgatctcaccgatgagatcgtgaaagatgtgaaacagacctacctcgcccgggtgtttagctaccccgccggcaatgtggagagcactggttccgctggcgagcctttatacgagaacagccccgaatttaccccttacctcgagaccaatttaggacagcccaccatccaaagctttgagcaagttggcacaaaggtgaatgtgacagtggaggacgagcggactttagtgcggcggaacaacacctttctcagcctccgggatgtgttcggcaaagatttaatctacacactgtattactggaagtcctcttcctccggcaagaagacagctaaaaccaacacaaacgagtttttaatcgacgtggataaaggcgaaaactactgtttcagcgtgcaagctgtgatcccctcccggaccgtgaataggaaaagcaccgatagccccgttgagtgcatgggccaagaaaagggcgagttccgggaggcacctacttcaagttctacaaagaaaacacagctacaactggagcatttactgctggatttacagatgattttgaatggaattaataattacaagaatcccaaactcaccaggatgctcacatttaagttttacatgcccaagaaggccacagaactgaaacatcttcagtgtctagaagaagaactcaaacctctggaggaagtgctaaatttagctcaaagcaaaaactttcacttaagacccagggacttaatcagcaatatcaacgtaatagttctggaactaaagggatctgaaacaacattcatgtgtgaatatgctgatgagacagcaaccattgtagaatttctgaacagatggattaccttttgtcaaagcatcatctcaacactaact

SEQ ID NO: 163 - protein, 503 aa, Artificial Sequence
  source: /note="Description of Artificial Sequence: Synthetic 2t2 sequence"
MKWVTFISLLFLFSSAYSAPTSSSTKKTQLQLEHLLLDLQMILNGINNYKNPKLTRMLTFKFYMPKKATELKHLQCLEEELKPLEEVLNLAQSKNFHLRPRDLISNINVIVLELKGSETTFMCEYADETATIVEFLNRWITFCQSIISTLTSGTTNTVAAYNLTWKSTNFKTILEWEPKPVNQVYTVQISTKSGDWKSKCFYTTDTECDLTDEIVKDVKQTYLARVFSYPAGNVESTGSAGEPLYENSPEFTPYLETNLGQPTIQSFEQVGTKVNVTVEDERTLVRRNNTFLSLRDVFGKDLIYTLYYWKSSSSGKKTAKTNTNEFLIDVDKGENYCFSVQAVIPSRTVNRKSTDSPVECMGQEKGEFREAPTSSSTKKTQLQLEHLLLDLQMILNGINNYKNPKLTRMLTFKFYMPKKATELKHLQCLEEELKPLEEVLNLAQSKNFHLRPRDLISNINVIVLELKGSETTFMCEYADETATIVEFLNRWITFCQSIISTLT

SEQ ID NO: 164 - DNA, 1509 bp, Artificial Sequence
  source: /note="Description of Artificial Sequence: Synthetic 2t2 sequence"
atgaagtgggtgaccttcatcagcctgctgttcctgttctccagcgcctactccgcccccacctcctcctccaccaagaagacccagctgcagctggagcatttactgctggatttacagatgattttaaacggcatcaacaactacaagaaccccaagctgactcgtatgctgaccttcaagttctacatgcccaagaaggccaccgagctgaagcatttacagtgtttagaggaggagctgaagcccctcgaggaggtgctgaatttagcccagtccaagaatttccatttaaggccccgggatttaatcagcaacatcaacgtgatcgttttagagctgaagggctccgagaccaccttcatgtgcgagtacgccgacgagaccgccaccatcgtggagtttttaaatcgttggatcaccttctgccagtccatcatctccactttaaccagcggcacaaccaacacagtcgctgcctataacctcacttggaagagcaccaacttcaaaaccatcctcgaatgggaacccaaacccgttaaccaagtttacaccgtgcagatcagcaccaagtccggcgactggaagtccaaatgtttctataccaccgacaccgagtgcgatctcaccgatgagatcgtgaaagatgtgaaacagacctacctcgcccgggtgtttagctaccccgccggcaatgtggagagcactggttccgctggcgagcctttatacgagaacagccccgaatttaccccttacctcgagaccaatttaggacagcccaccatccaaagctttgagcaagttggcacaaaggtgaatgtgacagtggaggacgagcggactttagtgcggcggaacaacacctttctcagcctccgggatgtgttcggcaaagatttaatctacacactgtattactggaagtcctcttcctccggcaagaagacagctaaaaccaacacaaacgagtttttaatcgacgtggataaaggcgaaaactactgtttcagcgtgcaagctgtgatcccctcccggaccgtgaataggaaaagcaccgatagccccgttgagtgcatgggccaagaaaagggcgagttccgggaggcacctacttcaagttctacaaagaaaacacagctacaactggagcatttactgctggatttacagatgattttgaatggaattaataattacaagaatcccaaactcaccaggatgctcacatttaagttttacatgcccaagaaggccacagaactgaaacatcttcagtgtctagaagaagaactcaaacctctggaggaagtgctaaatttagctcaaagcaaaaactttcacttaagacccagggacttaatcagcaatatcaacgtaatagttctggaactaaagggatctgaaacaacattcatgtgtgaatatgctgatgagacagcaaccattgtagaatttctgaacagatggattaccttttgtcaaagcatcatctcaacactaact

SEQ ID NO: 165 - DNA, 342 bp, Homo sapiens
  source: /note="IL-15"
aactgggtgaacgtgatcagcgatttaaagaagatcgaggatttaatccagagcatgcacatcgacgccactctgtacactgagagcgacgtgcaccctagctgcaaggtgactgccatgaagtgctttttactggagctgcaagttatctctttagagagcggcgatgccagcatccacgacactgtggagaatttaatcattttagccaacaactctttaagcagcaacggcaacgtgacagagagcggctgcaaggagtgcgaggagctggaggagaagaacatcaaggagtttttacagagcttcgtgcacatcgtgcagatgttcatcaacactagc

SEQ ID NO: 166 - DNA, 342 bp, Homo sapiens; identical to SEQ ID NO: 116
  source: /note="IL-15"

SEQ ID NO: 167 - protein, 447 aa, Artificial Sequence
  source: /note="Description of Artificial Sequence: Synthetic 15t15 sequence"
NWVNVISDLKKIEDLIQSMHIDATLYTESDVHPSCKVTAMKCFLLELQVISLESGDASIHDTVENLIILANNSLSSNGNVTESGCKECEELEEKNIKEFLQSFVHIVQMFINTSSGTTNTVAAYNLTWKSTNFKTILEWEPKPVNQVYTVQISTKSGDWKSKCFYTTDTECDLTDEIVKDVKQTYLARVFSYPAGNVESTGSAGEPLYENSPEFTPYLETNLGQPTIQSFEQVGTKVNVTVEDERTLVRRNNTFLSLRDVFGKDLIYTLYYWKSSSSGKKTAKTNTNEFLIDVDKGENYCFSVQAVIPSRTVNRKSTDSPVECMGQEKGEFRENWVNVISDLKKIEDLIQSMHIDATLYTESDVHPSCKVTAMKCFLLELQVISLESGDASIHDTVENLIILANNSLSSNGNVTESGCKECEELEEKNIKEFLQSFVHIVQMFINTS

SEQ ID NO: 168 - DNA, 1341 bp, Artificial Sequence
  source: /note="Description of Artificial Sequence: Synthetic 15t15 sequence"
aactgggtgaacgtgatcagcgatttaaagaagatcgaggatttaatccagagcatgcacatcgacgccactctgtacactgagagcgacgtgcaccctagctgcaaggtgactgccatgaagtgctttttactggagctgcaagttatctctttagagagcggcgatgccagcatccacgacactgtggagaatttaatcattttagccaacaactctttaagcagcaacggcaacgtgacagagagcggctgcaaggagtgcgaggagctggaggagaagaacatcaaggagtttttacagagcttcgtgcacatcgtgcagatgttcatcaacactagcagcggcacaaccaacacagtcgctgcctataacctcacttggaagagcaccaacttcaaaaccatcctcgaatgggaacccaaacccgttaaccaagtttacaccgtgcagatcagcaccaagtccggcgactggaagtccaaatgtttctataccaccgacaccgagtgcgatctcaccgatgagatcgtgaaagatgtgaaacagacctacctcgcccgggtgtttagctaccccgccggcaatgtggagagcactggttccgctggcgagcctttatacgagaacagccccgaatttaccccttacctcgagaccaatttaggacagcccaccatccaaagctttgagcaagttggcacaaaggtgaatgtgacagtggaggacgagcggactttagtgcggcggaacaacacctttctcagcctccgggatgtgttcggcaaagatttaatctacacactgtattactggaagtcctcttcctccggcaagaagacagctaaaaccaacacaaacgagtttttaatcgacgtggataaaggcgaaaactactgtttcagcgtgcaagctgtgatcccctcccggaccgtgaataggaaaagcaccgatagccccgttgagtgcatgggccaagaaaagggcgagttccgggagaactgggtgaacgtcatcagcgatttaaagaagatcgaagatttaattcagtccatgcatatcgacgccactttatacacagaatccgacgtgcacccctcttgtaaggtgaccgccatgaaatgttttttactggagctgcaagttatctctttagagagcggagacgctagcatccacgacaccgtggagaatttaatcattttagccaataactctttatccagcaacggcaacgtgacagagtccggctgcaaggagtgcgaagagctggaggagaagaacatcaaggagtttctgcaatcctttgtgcacattgtccagatgttcatcaatacctcc

SEQ ID NO: 169 - protein, 465 aa, Artificial Sequence
  source: /note="Description of Artificial Sequence: Synthetic 15t15 sequence"
MKWVTFISLLFLFSSAYSNWVNVISDLKKIEDLIQSMHIDATLYTESDVHPSCKVTAMKCFLLELQVISLESGDASIHDTVENLIILANNSLSSNGNVTESGCKECEELEEKNIKEFLQSFVHIVQMFINTSSGTTNTVAAYNLTWKSTNFKTILEWEPKPVNQVYTVQISTKSGDWKSKCFYTTDTECDLTDEIVKDVKQTYLARVFSYPAGNVESTGSAGEPLYENSPEFTPYLETNLGQPTIQSFEQVGTKVNVTVEDERTLVRRNNTFLSLRDVFGKDLIYTLYYWKSSSSGKKTAKTNTNEFLIDVDKGENYCFSVQAVIPSRTVNRKSTDSPVECMGQEKGEFRENWVNVISDLKKIEDLIQSMHIDATLYTESDVHPSCKVTAMKCFLLELQVISLESGDASIHDTVENLIILANNSLSSNGNVTESGCKECEELEEKNIKEFLQSFVHIVQMFINTS

SEQ ID NO: 170 - DNA, 1395 bp, Artificial Sequence
  source: /note="Description of Artificial Sequence: Synthetic 15t15 sequence"
atgaagtgggtgaccttcatcagcctgctgttcctgttctccagcgcctactccaactgggtgaacgtgatcagcgatttaaagaagatcgaggatttaatccagagcatgcacatcgacgccactctgtacactgagagcgacgtgcaccctagctgcaaggtgactgccatgaagtgctttttactggagctgcaagttatctctttagagagcggcgatgccagcatccacgacactgtggagaatttaatcattttagccaacaactctttaagcagcaacggcaacgtgacagagagcggctgcaaggagtgcgaggagctggaggagaagaacatcaaggagtttttacagagcttcgtgcacatcgtgcagatgttcatcaacactagcagcggcacaaccaacacagtcgctgcctataacctcacttggaagagcaccaacttcaaaaccatcctcgaatgggaacccaaacccgttaaccaagtttacaccgtgcagatcagcaccaagtccggcgactggaagtccaaatgtttctataccaccgacaccgagtgcgatctcaccgatgagatcgtgaaagatgtgaaacagacctacctcgcccgggtgtttagctaccccgccggcaatgtggagagcactggttccgctggcgagcctttatacgagaacagccccgaatttaccccttacctcgagaccaatttaggacagcccaccatccaaagctttgagcaagttggcacaaaggtgaatgtgacagtggaggacgagcggactttagtgcggcggaacaacacctttctcagcctccgggatgtgttcggcaaagatttaatctacacactgtattactggaagtcctcttcctccggcaagaagacagctaaaaccaacacaaacgagtttttaatcgacgtggataaaggcgaaaactactgtttcagcgtgcaagctgtgatcccctcccggaccgtgaataggaaaagcaccgatagccccgttgagtgcatgggccaagaaaagggcgagttccgggagaactgggtgaacgtcatcagcgatttaaagaagatcgaagatttaattcagtccatgcatatcgacgccactttatacacagaatccgacgtgcacccctcttgtaaggtgaccgccatgaaatgttttttactggagctgcaagttatctctttagagagcggagacgctagcatccacgacaccgtggagaatttaatcattttagccaataactctttatccagcaacggcaacgtgacagagtccggctgcaaggagtgcgaagagctggaggagaagaacatcaaggagtttctgcaatcctttgtgcacattgtccagatgttcatcaatacctcc

SEQ ID NO: 171 - DNA, 471 bp, Homo sapiens
  source: /note="IL-18"
tacttcggcaaactggaatccaagctgagcgtgatccggaatttaaacgaccaagttctgtttatcgatcaaggtaaccggcctctgttcgaggacatgaccgactccgattgccgggacaatgccccccggaccatcttcattatctccatgtacaaggacagccagccccggggcatggctgtgacaattagcgtgaagtgtgagaaaatcagcactttatcttgtgagaacaagatcatctcctttaaggaaatgaacccccccgataacatcaaggacaccaagtccgatatcatcttcttccagcggtccgtgcccggtcacgataacaagatgcagttcgaatcctcctcctacgagggctactttttagcttgtgaaaaggagagggatttattcaagctgatcctcaagaaggaggacgagctgggcgatcgttccatcatgttcaccgtccaaaacgaggat

SEQ ID NO: 172 - DNA, 918 bp, Homo sapiens
  source: /note="IL12Beta"
atttgggaactgaagaaggacgtctacgtggtcgaactggactggtatcccgatgctcccggcgaaatggtggtgctcacttgtgacacccccgaagaagacggcatcacttggaccctcgatcagagcagcgaggtgctgggctccggaaagaccctcacaatccaagttaaggagttcggagacgctggccaatacacatgccacaagggaggcgaggtgctcagccattccttattattattacacaagaaggaagacggaatctggtccaccgacattttaaaagatcagaaggagcccaagaataagacctttttaaggtgtgaggccaaaaactacagcggtcgtttcacttgttggtggctgaccaccatttccaccgatttaaccttctccgtgaaaagcagccggggaagctccgaccctcaaggtgtgacatgtggagccgctaccctcagcgctgagagggttcgtggcgataacaaggaatacgagtacagcgtggagtgccaagaagatagcgcttgtcccgctgccgaagaatctttacccattgaggtgatggtggacgccgtgcacaaactcaagtacgagaactacacctcctccttctttatccgggacatcattaagcccgatcctcctaagaatttacagctgaagcctctcaaaaatagccggcaagttgaggtctcttgggaatatcccgacacttggagcacaccccacagctacttctctttaaccttttgtgtgcaagttcaaggtaaaagcaagcgggagaagaaagaccgggtgtttaccgacaaaaccagcgccaccgtcatctgtcggaagaacgcctccatcagcgtgagggctcaagatcgttattactccagcagctggtccgagtgggccagcgtgccttgttcc

SEQ ID NO: 173 - DNA, 591 bp, Homo sapiens
  source: /note="IL-12alpha"
cgtaacctccccgtggctacccccgatcccggaatgttcccttgtttacaccacagccagaatttactgagggccgtgagcaacatgctgcagaaagctaggcagactttagaattttacccttgcaccagcgaggagatcgaccatgaagatatcaccaaggacaagacatccaccgtggaggcttgtttacctctggagctgacaaagaacgagtcttgtctcaactctcgtgaaaccagcttcatcacaaatggctcttgtttagcttcccggaagacctcctttatgatggctttatgcctcagctccatctacgaggatttaaagatgtaccaagtggagttcaagaccatgaacgccaagctgctcatggaccctaaacggcagatctttttagaccagaacatgctggctgtgattgatgagctgatgcaagctttaaacttcaactccgagaccgtccctcagaagtcctccctcgaggagcccgatttttacaagacaaagatcaaactgtgcattttactccacgcctttaggatccgggccgtgaccattgaccgggtcatgagctatttaaacgccagc

SEQ ID NO: 174 - protein, 490 aa, Artificial Sequence
  source: /note="Description of Artificial Sequence: Synthetic 18t15-12s sequence"
YFGKLESKLSVIRNLNDQVLFIDQGNRPLFEDMTDSDCRDNAPRTIFIISMYKDSQPRGMAVTISVKCEKISTLSCENKIISFKEMNPPDNIKDTKSDIIFFQRSVPGHDNKMQFESSSYEGYFLACEKERDLFKLILKKEDELGDRSIMFTVQNEDSGTTNTVAAYNLTWKSTNFKTILEWEPKPVNQVYTVQISTKSGDWKSKCFYTTDTECDLTDEIVKDVKQTYLARVFSYPAGNVESTGSAGEPLYENSPEFTPYLETNLGQPTIQSFEQVGTKVNVTVEDERTLVRRNNTFLSLRDVFGKDLIYTLYYWKSSSSGKKTAKTNTNEFLIDVDKGENYCFSVQAVIPSRTVNRKSTDSPVECMGQEKGEFRENWVNVISDLKKIEDLIQSMHIDATLYTESDVHPSCKVTAMKCFLLELQVISLESGDASIHDTVENLIILANNSLSSNGNVTESGCKECEELEEKNIKEFLQSFVHIVQMFINTS

SEQ ID NO: 175 - DNA, 1470 bp, Artificial Sequence
  source: /note="Description of Artificial Sequence: Synthetic 18t15-12s sequence"
tacttcggcaaactggaatccaagctgagcgtgatccggaatttaaacgaccaagttctgtttatcgatcaaggtaaccggcctctgttcgaggacatgaccgactccgattgccgggacaatgccccccggaccatcttcattatctccatgtacaaggacagccagccccggggcatggctgtgacaattagcgtgaagtgtgagaaaatcagcactttatcttgtgagaacaagatcatctcctttaaggaaatgaacccccccgataacatcaaggacaccaagtccgatatcatcttcttccagcggtccgtgcccggtcacgataacaagatgcagttcgaatcctcctcctacgagggctactttttagcttgtgaaaaggagagggatttattcaagctgatcctcaagaaggaggacgagctgggcgatcgttccatcatgttcaccgtccaaaacgaggatagcggcacaaccaacacagtcgctgcctataacctcacttggaagagcaccaacttcaaaaccatcctcgaatgggaacccaaacccgttaaccaagtttacaccgtgcagatcagcaccaagtccggcgactggaagtccaaatgtttctataccaccgacaccgagtgcgatctcaccgatgagatcgtgaaagatgtgaaacagacctacctcgcccgggtgtttagctaccccgccggcaatgtggagagcactggttccgctggcgagcctttatacgagaacagccccgaatttaccccttacctcgagaccaatttaggacagcccaccatccaaagctttgagcaagttggcacaaaggtgaatgtgacagtggaggacgagcggactttagtgcggcggaacaacacctttctcagcctccgggatgtgttcggcaaagatttaatctacacactgtattactggaagtcctcttcctccggcaagaagacagctaaaaccaacacaaacgagtttttaatcgacgtggataaaggcgaaaactactgtttcagcgtgcaagctgtgatcccctcccggaccgtgaataggaaaagcaccgatagccccgttgagtgcatgggccaagaaaagggcgagttccgggagaactgggtgaacgtcatcagcgatttaaagaagatcgaagatttaattcagtccatgcatatcgacgccactttatacacagaatccgacgtgcacccctcttgtaaggtgaccgccatgaaatgttttttactggagctgcaagttatctctttagagagcggagacgctagcatccacgacaccgtggagaatttaatcattttagccaataactctttatccagcaacggcaacgtgacagagtccggctgcaaggagtgcgaagagctggaggagaagaacatcaaggagtttctgcaatcctttgtgcacattgtccagatgttcatcaatacctcc

SEQ ID NO: 176 - protein, 508 aa, Artificial Sequence
  source: /note="Description of Artificial Sequence: Synthetic 18t15-12s sequence"
MKWVTFISLLFLFSSAYSYFGKLESKLSVIRNLNDQVLFIDQGNRPLFEDMTDSDCRDNAPRTIFIISMYKDSQPRGMAVTISVKCEKISTLSCENKIISFKEMNPPDNIKDTKSDIIFFQRSVPGHDNKMQFESSSYEGYFLACEKERDLFKLILKKEDELGDRSIMFTVQNEDSGTTNTVAAYNLTWKSTNFKTILEWEPKPVNQVYTVQISTKSGDWKSKCFYTTDTECDLTDEIVKDVKQTYLARVFSYPAGNVESTGSAGEPLYENSPEFTPYLETNLGQPTIQSFEQVGTKVNVTVEDERTLVRRNNTFLSLRDVFGKDLIYTLYYWKSSSSGKKTAKTNTNEFLIDVDKGENYCFSVQAVIPSRTVNRKSTDSPVECMGQEKGEFRENWVNVISDLKKIEDLIQSMHIDATLYTESDVHPSCKVTAMKCFLLELQVISLESGDASIHDTVENLIILANNSLSSNGNVTESGCKECEELEEKNIKEFLQSFVHIVQMFINTS

SEQ ID NO: 177 - DNA, 1524 bp, Artificial Sequence
  source: /note="Description of Artificial Sequence: Synthetic 18t15-12s sequence"
atgaagtgggtcacatttatctctttactgttcctcttctccagcgcctacagctacttcggcaaactggaatccaagctgagcgtgatccggaatttaaacgaccaagttctgtttatcgatcaaggtaaccggcctctgttcgaggacatgaccgactccgattgccgggacaatgccccccggaccatcttcattatctccatgtacaaggacagccagccccggggcatggctgtgacaattagcgtgaagtgtgagaaaatcagcactttatcttgtgagaacaagatcatctcctttaaggaaatgaacccccccgataacatcaaggacaccaagtccgatatcatcttcttccagcggtccgtgcccggtcacgataacaagatgcagttcgaatcctcctcctacgagggctactttttagcttgtgaaaaggagagggatttattcaagctgatcctcaagaaggaggacgagctgggcgatcgttccatcatgttcaccgtccaaaacgaggatagcggcacaaccaacacagtcgctgcctataacctcacttggaagagcaccaacttcaaaaccatcctcgaatgggaacccaaacccgttaaccaagtttacaccgtgcagatcagcaccaagtccggcgactggaagtccaaatgtttctataccaccgacaccgagtgcgatctcaccgatgagatcgtgaaagatgtgaaacagacctacctcgcccgggtgtttagctaccccgccggcaatgtggagagcactggttccgctggcgagcctttatacgagaacagccccgaatttaccccttacctcgagaccaatttaggacagcccaccatccaaagctttgagcaagttggcacaaaggtgaatgtgacagtggaggacgagcggactttagtgcggcggaacaacacctttctcagcctccgggatgtgttcggcaaagatttaatctacacactgtattactggaagtcctcttcctccggcaagaagacagctaaaaccaacacaaacgagtttttaatcgacgtggataaaggcgaaaactactgtttcagcgtgcaagctgtgatcccctcccggaccgtgaataggaaaagcaccgatagccccgttgagtgcatgggccaagaaaagggcgagttccgggagaactgggtgaacgtcatcagcgatttaaagaagatcgaagatttaattcagtccatgcatatcgacgccactttatacacagaatccgacgtgcacccctcttgtaaggtgaccgccatgaaatgttttttactggagctgcaagttatctctttagagagcggagacgctagcatccacgacaccgtggagaatttaatcattttagccaataactctttatccagcaacggcaacgtgacagagtccggctgcaaggagtgcgaagagctggaggagaagaacatcaaggagtttctgcaatcctttgtgcacattgtccagatgttcatcaatacctcc

SEQ ID NO: 178 - protein, 583 aa, Artificial Sequence
  source: /note="Description of Artificial Sequence: Synthetic 18t15-12s sequence"
IWELKKDVYVVELDWYPDAPGEMVVLTCDTPEEDGITWTLDQSSEVLGSGKTLTIQVKEFGDAGQYTCHKGGEVLSHSLLLLHKKEDGIWSTDILKDQKEPKNKTFLRCEAKNYSGRFTCWWLTTISTDLTFSVKSSRGSSDPQGVTCGAATLSAERVRGDNKEYEYSVECQEDSACPAAEESLPIEVMVDAVHKLKYENYTSSFFIRDIIKPDPPKNLQLKPLKNSRQVEVSWEYPDTWSTPHSYFSLTFCVQVQGKSKREKKDRVFTDKTSATVICRKNASISVRAQDRYYSSSWSEWASVPCSGGGGSGGGGSGGGGSRNLPVATPDPGMFPCLHHSQNLLRAVSNMLQKARQTLEFYPCTSEEIDHEDITKDKTSTVEACLPLELTKNESCLNSRETSFITNGSCLASRKTSFMMALCLSSIYEDLKMYQVEFKTMNAKLLMDPKRQIFLDQNMLAVIDELMQALNFNSETVPQKSSLEEPDFYKTKIKLCILLHAFRIRAVTIDRVMSYLNASITCPPPMSVEHADIWVKSYSLYSRERYICNSGFKRKAGTSSLTECVLNKATNVAHWTTPSLKCIR

SEQ ID NO: 179 - DNA, 1749 bp, Artificial Sequence
  source: /note="Description of Artificial Sequence: Synthetic 18t15-12s sequence"
atttgggaactgaagaaggacgtctacgtggtcgaactggactggtatcccgatgctcccggcgaaatggtggtgctcacttgtgacacccccgaagaagacggcatcacttggaccctcgatcagagcagcgaggtgctgggctccggaaagaccctcacaatccaagttaaggagttcggagacgctggccaatacacatgccacaagggaggcgaggtgctcagccattccttattattattacacaagaaggaagacggaatctggtccaccgacattttaaaagatcagaaggagcccaagaataagacctttttaaggtgtgaggccaaaaactacagcggtcgtttcacttgttggtggctgaccaccatttccaccgatttaaccttctccgtgaaaagcagccggggaagctccgaccctcaaggtgtgacatgtggagccgctaccctcagcgctgagagggttcgtggcgataacaaggaatacgagtacagcgtggagtgccaagaagatagcgcttgtcccgctgccgaagaatctttacccattgaggtgatggtggacgccgtgcacaaactcaagtacgagaactacacctcctccttctttatccgggacatcattaagcccgatcctcctaagaatttacagctgaagcctctcaaaaatagccggcaagttgaggtctcttgggaatatcccgacacttggagcacaccccacagctacttctctttaaccttttgtgtgcaagttcaaggtaaaagcaagcgggagaagaaagaccgggtgtttaccgacaaaaccagcgccaccgtcatctgtcggaagaacgcctccatcagcgtgagggctcaagatcgttattactccagcagctggtccgagtgggccagcgtgccttgttccggcggtggaggatccggaggaggtggctccggcggcggaggatctcgtaacctccccgtggctacccccgatcccggaatgttcccttgtttacaccacagccagaatttactgagggccgtgagcaacatgctgcagaaagctaggcagactttagaattttacccttgcaccagcgaggagatcgaccatgaagatatcaccaaggacaagacatccaccgtggaggcttgtttacctctggagctgacaaagaacgagtcttgtctcaactctcgtgaaaccagcttcatcacaaatggctcttgtttagcttcccggaagacctcctttatgatggctttatgcctcagctccatctacgaggatttaaagatgtaccaagtggagttcaagaccatgaacgccaagctgctcatggaccctaaacggcagatctttttagaccagaacatgctggctgtgattgatgagctgatgcaagctttaaacttcaactccgagaccgtccctcagaagtcctccctcgaggagcccgatttttacaagacaaagatcaaactgtgcattttactccacgcctttaggatccgggccgtgaccattgaccgggtcatgagctatttaaacgccagcattacatgcccccctcccatgagcgtggagcacgccgacatctgggtgaagagctatagcctctacagccgggagaggtatatctgtaacagcggcttcaagaggaaggccggcaccagcagcctcaccgagtgcgtgctgaataaggctaccaacgtggctcactggacaacaccctctttaaagtgcatccgg

SEQ ID NO: 180 - protein, 601 aa, Artificial Sequence
  source: /note="Description of Artificial Sequence: Synthetic 18t15-12s sequence"
MKWVTFISLLFLFSSAYSIWELKKDVYVVELDWYPDAPGEMVVLTCDTPEEDGITWTLDQSSEVLGSGKTLTIQVKEFGDAGQYTCHKGGEVLSHSLLLLHKKEDGIWSTDILKDQKEPKNKTFLRCEAKNYSGRFTCWWLTTISTDLTFSVKSSRGSSDPQGVTCGAATLSAERVRGDNKEYEYSVECQEDSACPAAEESLPIEVMVDAVHKLKYENYTSSFFIRDIIKPDPPKNLQLKPLKNSRQVEVSWEYPDTWSTPHSYFSLTFCVQVQGKSKREKKDRVFTDKTSATVICRKNASISVRAQDRYYSSSWSEWASVPCSGGGGSGGGGSGGGGSRNLPVATPDPGMFPCLHHSQNLLRAVSNMLQKARQTLEFYPCTSEEIDHEDITKDKTSTVEACLPLELTKNESCLNSRETSFITNGSCLASRKTSFMMALCLSSIYEDLKMYQVEFKTMNAKLLMDPKRQIFLDQNMLAVIDELMQALNFNSETVPQKSSLEEPDFYKTKIKLCILLHAFRIRAVTIDRVMSYLNASITCPPPMSVEHADIWVKSYSLYSRERYICNSGFKRKAGTSSLTECVLNKATNVAHWTTPSLKCIR

SEQ ID NO: 181 - DNA, 1803 bp, Artificial Sequence
  source: /note="Description of Artificial Sequence: Synthetic 18t15-12s sequence"
atgaaatgggtgacctttatttctttactgttcctctttagcagcgcctactccatttgggaactgaagaaggacgtctacgtggtcgaactggactggtatcccgatgctcccggcgaaatggtggtgctcacttgtgacacccccgaagaagacggcatcacttggaccctcgatcagagcagcgaggtgctgggctccggaaagaccctcacaatccaagttaaggagttcggagacgctggccaatacacatgccacaagggaggcgaggtgctcagccattccttattattattacacaagaaggaagacggaatctggtccaccgacattttaaaagatcagaaggagcccaagaataagacctttttaaggtgtgaggccaaaaactacagcggtcgtttcacttgttggtggctgaccaccatttccaccgatttaaccttctccgtgaaaagcagccggggaagctccgaccctcaaggtgtgacatgtggagccgctaccctcagcgctgagagggttcgtggcgataacaaggaatacgagtacagcgtggagtgccaagaagatagcgcttgtcccgctgccgaagaatctttacccattgaggtgatggtggacgccgtgcacaaactcaagtacgagaactacacctcctccttctttatccgggacatcattaagcccgatcctcctaagaatttacagctgaagcctctcaaaaatagccggcaagttgaggtctcttgggaatatcccgacacttggagcacaccccacagctacttctctttaaccttttgtgtgcaagttcaaggtaaaagcaagcgggagaagaaagaccgggtgtttaccgacaaaaccagcgccaccgtcatctgtcggaagaacgcctccatcagcgtgagggctcaagatcgttattactccagcagctggtccgagtgggccagcgtgccttgttccggcggtggaggatccggaggaggtggctccggcggcggaggatctcgtaacctccccgtggctacccccgatcccggaatgttcccttgtttacaccacagccagaatttactgagggccgtgagcaacatgctgcagaaagctaggcagactttagaattttacccttgcaccagcgaggagatcgaccatgaagatatcaccaaggacaagacatccaccgtggaggcttgtttacctctggagctgacaaagaacgagtcttgtctcaactctcgtgaaaccagcttcatcacaaatggctcttgtttagcttcccggaagacctcctttatgatggctttatgcctcagctccatctacgaggatttaaagatgtaccaagtggagttcaagaccatgaacgccaagctgctcatggaccctaaacggcagatctttttagaccagaacatgctggctgtgattgatgagctgatgcaagctttaaacttcaactccgagaccgtccctcagaagtcctccctcgaggagcccgatttttacaagacaaagatcaaactgtgcattttactccacgcctttaggatccgggccgtgaccattgaccgggtcatgagctatttaaacgccagcattacatgcccccctcccatgagcgtggagcacgccgacatctgggtgaagagctatagcctctacagccgggagaggtatatctgtaacagcggcttcaagaggaaggccggcaccagcagcctcaccgagtgcgtgctgaataaggctaccaacgtggctcactggacaacaccctctttaaagtgcatccgg

SEQ ID NO: 182 - DNA, 399 bp, Homo sapiens
  source: /note="IL-21"
cagggccaggacaggcacatgatccggatgaggcagctcatcgacatcgtcgaccagctgaagaactacgtgaacgacctggtgcccgagtttctgcctgcccccgaggacgtggagaccaactgcgagtggtccgccttctcctgctttcagaaggcccagctgaagtccgccaacaccggcaacaacgagcggatcatcaacgtgagcatcaagaagctgaagcggaagcctccctccacaaacgccggcaggaggcagaagcacaggctgacctgccccagctgtgactcctacgagaagaagccccccaaggagttcctggagaggttcaagtccctgctgcagaagatgatccatcagcacctgtcctccaggacccacggctccgaggactcc

SEQ ID NO: 183 - protein, 136 aa, Homo sapiens
  source: /note="TGFRbetaRII"
IPPHVQKSVNNDMIVTDNNGAVKFPQLCKFCDVRFSTCDNQKSCMSNCSITSICEKPQEVCVAVWRKNDENITLETVCHDPKLPYHDFILEDAASPKCIMKEKKKPGETFFMCSCSSDECNDNIIFSEEYNTSNPD

SEQ ID NO: 184 - protein, 136 aa, Homo sapiens; identical to SEQ ID NO: 183
  source: /note="TGFRbetaRII"

SEQ ID NO: 185 - DNA, 408 bp, Homo sapiens
  source: /note="TGFRbetaRII"
atccccccccatgtgcaaaagagcgtgaacaacgatatgatcgtgaccgacaacaacggcgccgtgaagtttccccagctctgcaagttctgcgatgtcaggttcagcacctgcgataatcagaagtcctgcatgtccaactgcacgatcacctccatctgcgagaagccccaagaagtgtgcgtggccgtgtggcggaaaaatgacgagaacatcaccctggagaccgtgtgtcacgaccccaagctcccttatcacgacttcattctggaggacgctgcctcccccaaatgcatcatgaaggagaagaagaagcccggagagaccttctttatgtgttcctgtagcagcgacgagtgtaacgacaacatcatcttcagcgaagagtacaacaccagcaaccctgat

SEQ ID NO: 186 - DNA, 408 bp, Homo sapiens
  source: /note="TGFRbetaRII"
attcctccccacgtgcagaagagcgtgaataatgacatgatcgtgaccgataacaatggcgccgtgaaatttccccagctgtgcaaattctgcgatgtgaggttttccacctgcgacaaccagaagtcctgtatgagcaactgcacaatcacctccatctgtgagaagcctcaggaggtgtgcgtggctgtctggcggaagaatgacgagaatatcaccctggaaaccgtctgccacgatcccaagctgccctaccacgatttcatcctggaagacgccgccagccctaagtgcatcatgaaagagaaaaagaagcctggcgagacctttttcatgtgctcctgcagcagcgacgaatgcaacgacaatatcatctttagcgaggaatacaataccagcaaccccgac

SEQ ID NO: 187 - DNA, 861 bp, Homo sapiens
  source: /note="TGFRbetaRII"
atccccccccatgtgcaaaagagcgtgaacaacgatatgatcgtgaccgacaacaacggcgccgtgaagtttccccagctctgcaagttctgcgatgtcaggttcagcacctgcgataatcagaagtcctgcatgtccaactgcacgatcacctccatctgcgagaagccccaagaagtgtgcgtggccgtgtggcggaaaaatgacgagaacatcaccctggagaccgtgtgtcacgaccccaagctcccttatcacgacttcattctggaggacgctgcctcccccaaatgcatcatgaaggagaagaagaagcccggagagaccttctttatgtgttcctgtagcagcgacgagtgtaacgacaacatcatcttcagcgaagagtacaacaccagcaaccctgatggaggtggcggatccggaggtggaggttctggtggaggtgggagtattcctccccacgtgcagaagagcgtgaataatgacatgatcgtgaccgataacaatggcgccgtgaaatttccccagctgtgcaaattctgcgatgtgaggttttccacctgcgacaaccagaagtcctgtatgagcaactgcacaatcacctccatctgtgagaagcctcaggaggtgtgcgtggctgtctggcggaagaatgacgagaatatcaccctggaaaccgtctgccacgatcccaagctgccctaccacgatttcatcctggaagacgccgccagccctaagtgcatcatgaaagagaaaaagaagcctggcgagacctttttcatgtgctcctgcagcagcgacgaatgcaacgacaatatcatctttagcgaggaatacaataccagcaaccccgac

SEQ ID NO: 188 - protein, 287 aa, Homo sapiens
  source: /note="TGFRbetaRII"
IPPHVQKSVNNDMIVTDNNGAVKFPQLCKFCDVRFSTCDNQKSCMSNCSITSICEKPQEVCVAVWRKNDENITLETVCHDPKLPYHDFILEDAASPKCIMKEKKKPGETFFMCSCSSDECNDNIIFSEEYNTSNPDGGGGSGGGGSGGGGSIPPHVQKSVNNDMIVTDNNGAVKFPQLCKFCDVRFSTCDNQKSCMSNCSITSICEKPQEVCVAVWRKNDENITLETVCHDPKLPYHDFILEDAASPKCIMKEKKKPGETFFMCSCSSDECNDNIIFSEEYNTSNPD

SEQ ID NO: 189 - protein, 466 aa, Artificial Sequence
  source: /note="Description of Artificial Sequence: Synthetic 21t15-TGFRs sequence"
QGQDRHMIRMRQLIDIVDQLKNYVNDLVPEFLPAPEDVETNCEWSAFSCFQKAQLKSANTGNNERIINVSIKKLKRKPPSTNAGRRQKHRLTCPSCDSYEKKPPKEFLERFKSLLQKMIHQHLSSRTHGSEDSSGTTNTVAAYNLTWKSTNFKTILEWEPKPVNQVYTVQISTKSGDWKSKCFYTTDTECDLTDEIVKDVKQTYLARVFSYPAGNVESTGSAGEPLYENSPEFTPYLETNLGQPTIQSFEQVGTKVNVTVEDERTLVRRNNTFLSLRDVFGKDLIYTLYYWKSSSSGKKTAKTNTNEFLIDVDKGENYCFSVQAVIPSRTVNRKSTDSPVECMGQEKGEFRENWVNVISDLKKIEDLIQSMHIDATLYTESDVHPSCKVTAMKCFLLELQVISLESGDASIHDTVENLIILANNSLSSNGNVTESGCKECEELEEKNIKEFLQSFVHIVQMFINTS

SEQ ID NO: 190 - DNA, 1398 bp, Artificial Sequence
  source: /note="Description of Artificial Sequence: Synthetic 21t15-TGFRs sequence"
cagggccaggacaggcacatgatccggatgaggcagctcatcgacatcgtcgaccagctgaagaactacgtgaacgacctggtgcccgagtttctgcctgcccccgaggacgtggagaccaactgcgagtggtccgccttctcctgctttcagaaggcccagctgaagtccgccaacaccggcaacaacgagcggatcatcaacgtgagcatcaagaagctgaagcggaagcctccctccacaaacgccggcaggaggcagaagcacaggctgacctgccccagctgtgactcctacgagaagaagccccccaaggagttcctggagaggttcaagtccctgctgcagaagatgatccatcagcacctgtcctccaggacccacggctccgaggactcctccggcaccaccaataccgtggccgcttataacctcacatggaagagcaccaacttcaagacaattctggaatgggaacccaagcccgtcaatcaagtttacaccgtgcagatctccaccaaatccggagactggaagagcaagtgcttctacacaacagacaccgagtgtgatttaaccgacgaaatcgtcaaggacgtcaagcaaacctatctggctcgggtcttttcctaccccgctggcaatgtcgagtccaccggctccgctggcgagcctctctacgagaattcccccgaattcaccccttatttagagaccaatttaggccagcctaccatccagagcttcgagcaagttggcaccaaggtgaacgtcaccgtcgaggatgaaaggactttagtgcggcggaataacacatttttatccctccgggatgtgttcggcaaagacctcatctacacactgtactattggaagtccagctcctccggcaaaaagaccgctaagaccaacaccaacgagtttttaattgacgtggacaaaggcgagaactactgcttcagcgtgcaagccgtgatcccttctcgtaccgtcaaccggaagagcacagattcccccgttgagtgcatgggccaagaaaagggcgagttccgggagaactgggtgaacgtcatcagcgatttaaagaagatcgaagatttaattcagtccatgcatatcgacgccactttatacacagaatccgacgtgcacccctcttgtaaggtgaccgccatgaaatgttttttactggagctgcaagttatctctttagagagcggagacgctagcatccacgacaccgtggagaatttaatcattttagccaataactctttatccagcaacggcaacgtgacagagtccggctgcaaggagtgcgaagagctggaggagaagaacatcaaggagtttctgcaatcctttgtgcacattgtccagatgttcatcaatacctcc

SEQ ID NO: 191 - protein, 484 aa, Artificial Sequence
  source: /note="Description of Artificial Sequence: Synthetic 21t15-TGFRs sequence"
MKWVTFISLLFLFSSAYSQGQDRHMIRMRQLIDIVDQLKNYVNDLVPEFLPAPEDVETNCEWSAFSCFQKAQLKSANTGNNERIINVSIKKLKRKPPSTNAGRRQKHRLTCPSCDSYEKKPPKEFLERFKSLLQKMIHQHLSSRTHGSEDSSGTTNTVAAYNLTWKSTNFKTILEWEPKPVNQVYTVQISTKSGDWKSKCFYTTDTECDLTDEIVKDVKQTYLARVFSYPAGNVESTGSAGEPLYENSPEFTPYLETNLGQPTIQSFEQVGTKVNVTVEDERTLVRRNNTFLSLRDVFGKDLIYTLYYWKSSSSGKKTAKTNTNEFLIDVDKGENYCFSVQAVIPSRTVNRKSTDSPVECMGQEKGEFRENWVNVISDLKKIEDLIQSMHIDATLYTESDVHPSCKVTAMKCFLLELQVISLESGDASIHDTVENLIILANNSLSSNGNVTESGCKECEELEEKNIKEFLQSFVHIVQMFINTS

SEQ ID NO: 192 - DNA, 1452 bp, Artificial Sequence
  source: /note="Description of Artificial Sequence: Synthetic 21t15-TGFRs sequence"
atgaagtgggtgaccttcatcagcctgctgttcctgttctccagcgcctactcccagggccaggacaggcacatgatccggatgaggcagctcatcgacatcgtcgaccagctgaagaactacgtgaacgacctggtgcccgagtttctgcctgcccccgaggacgtggagaccaactgcgagtggtccgccttctcctgctttcagaaggcccagctgaagtccgccaacaccggcaacaacgagcggatcatcaacgtgagcatcaagaagctgaagcggaagcctccctccacaaacgccggcaggaggcagaagcacaggctgacctgccccagctgtgactcctacgagaagaagccccccaaggagttcctggagaggttcaagtccctgctgcagaagatgatccatcagcacctgtcctccaggacccacggctccgaggactcctccggcaccaccaataccgtggccgcttataacctcacatggaagagcaccaacttcaagacaattctggaatgggaacccaagcccgtcaatcaagtttacaccgtgcagatctccaccaaatccggagactggaagagcaagtgcttctacacaacagacaccgagtgtgatttaaccgacgaaatcgtcaaggacgtcaagcaaacctatctggctcgggtcttttcctaccccgctggcaatgtcgagtccaccggctccgctggcgagcctctctacgagaattcccccgaattcaccccttatttagagaccaatttaggccagcctaccatccagagcttcgagcaagttggcaccaaggtgaacgtcaccgtcgaggatgaaaggactttagtgcggcggaataacacatttttatccctccgggatgtgttcggcaaagacctcatctacacactgtactattggaagtccagctcctccggcaaaaagaccgctaagaccaacaccaacgagtttttaattgacgtggacaaaggcgagaactactgcttcagcgtgcaagccgtgatcccttctcgtaccgtcaaccggaagagcacagattcccccgttgagtgcatgggccaagaaaagggcgagttccgggagaactgggtgaacgtcatcagcgatttaaagaagatcgaagatttaattcagtccatgcatatcgacgccactttatacacagaatccgacgtgcacccctcttgtaaggtgaccgccatgaaatgttttttactggagctgcaagttatctctttagagagcggagacgctagcatccacgacaccgtggagaatttaatcattttagccaataactctttatccagcaacggcaacgtgacagagtccggctgcaaggagtgcgaagagctggaggagaagaacatcaaggagtttctgcaatcctttgtgcacattgtccagatgttcatcaatacctcc

SEQ ID NO: 193 - protein, 352 aa, Artificial Sequence
  source: /note="Description of Artificial Sequence: Synthetic 21t15-TGFRs sequence"
IPPHVQKSVNNDMIVTDNNGAVKFPQLCKFCDVRFSTCDNQKSCMSNCSITSICEKPQEVCVAVWRKNDENITLETVCHDPKLPYHDFILEDAASPKCIMKEKKKPGETFFMCSCSSDECNDNIIFSEEYNTSNPDGGGGSGGGGSGGGGSIPPHVQKSVNNDMIVTDNNGAVKFPQLCKFCDVRFSTCDNQKSCMSNCSITSICEKPQEVCVAVWRKNDENITLETVCHDPKLPYHDFILEDAASPKCIMKEKKKPGETFFMCSCSSDECNDNIIFSEEYNTSNPDITCPPPMSVEHADIWVKSYSLYSRERYICNSGFKRKAGTSSLTECVLNKATNVAHWTTPSLKCIR

SEQ ID NO: 194 - DNA, 1056 bp, Artificial Sequence
  source: /note="Description of Artificial Sequence: Synthetic 21t15-TGFRs sequence"
atccccccccatgtgcaaaagagcgtgaacaacgatatgatcgtgaccgacaacaacggcgccgtgaagtttccccagctctgcaagttctgcgatgtcaggttcagcacctgcgataatcagaagtcctgcatgtccaactgcacgatcacctccatctgcgagaagccccaagaagtgtgcgtggccgtgtggcggaaaaatgacgagaacatcaccctggagaccgtgtgtcacgaccccaagctcccttatcacgacttcattctggaggacgctgcctcccccaaatgcatcatgaaggagaagaagaagcccggagagaccttctttatgtgttcctgtagcagcgacgagtgtaacgacaacatcatcttcagcgaagagtacaacaccagcaaccctgatggaggtggcggatccggaggtggaggttctggtggaggtgggagtattcctccccacgtgcagaagagcgtgaataatgacatgatcgtgaccgataacaatggcgccgtgaaatttccccagctgtgcaaattctgcgatgtgaggttttccacctgcgacaaccagaagtcctgtatgagcaactgcacaatcacctccatctgtgagaagcctcaggaggtgtgcgtggctgtctggcggaagaatgacgagaatatcaccctggaaaccgtctgccacgatcccaagctgccctaccacgatttcatcctggaagacgccgccagccctaagtgcatcatgaaagagaaaaagaagcctggcgagacctttttcatgtgctcctgcagcagcgacgaatgcaacgacaatatcatctttagcgaggaatacaataccagcaaccccgacatcacgtgtcctcctcctatgtccgtggaacacgcagacatctgggtcaagagctacagcttgtactccagggagcggtacatttgtaactctggtttcaagcgtaaagccggcacgtccagcctgacggagtgcgtgttgaacaaggccacgaatgtcgcccactggacaacccccagtctcaaatgtattaga

SEQ ID NO: 195 - protein, 370 aa, Artificial Sequence
  source: /note="Description of Artificial Sequence: Synthetic 21t15-TGFRs sequence"
MKWVTFISLLFLFSSAYSIPPHVQKSVNNDMIVTDNNGAVKFPQLCKFCDVRFSTCDNQKSCMSNCSITSICEKPQEVCVAVWRKNDENITLETVCHDPKLPYHDFILEDAASPKCIMKEKKKPGETFFMCSCSSDECNDNIIFSEEYNTSNPDGGGGSGGGGSGGGGSIPPHVQKSVNNDMIVTDNNGAVKFPQLCKFCDVRFSTCDNQKSCMSNCSITSICEKPQEVCVAVWRKNDENITLETVCHDPKLPYHDFILEDAASPKCIMKEKKKPGETFFMCSCSSDECNDNIIFSEEYNTSNPDITCPPPMSVEHADIWVKSYSLYSRERYICNSGFKRKAGTSSLTECVLNKATNVAHWTTPSLKCIR

SEQ ID NO: 196 - DNA, 1110 bp, Artificial Sequence
  source: /note="Description of Artificial Sequence: Synthetic TGFRt15-TGFRs21 sequence"
atgaagtgggtgaccttcatcagcctgctgttcctgttctccagcgcctactccatccccccccatgtgcaaaagagcgtgaacaacgatatgatcgtgaccgacaacaacggcgccgtgaagtttccccagctctgcaagttctgcgatgtcaggttcagcacctgcgataatcagaagtcctgcatgtccaactgcacgatcacctccatctgcgagaagccccaagaagtgtgcgtggccgtgtggcggaaaaatgacgagaacatcaccctggagaccgtgtgtcacgaccccaagctcccttatcacgacttcattctggaggacgctgcctcccccaaatgcatcatgaaggagaagaagaagcccggagagaccttctttatgtgttcctgtagcagcgacgagtgtaacgacaacatcatcttcagcgaagagtacaacaccagcaaccctgatggaggtggcggatccggaggtggaggttctggtggaggtgggagtattcctccccacgtgcagaagagcgtgaataatgacatgatcgtgaccgataacaatggcgccgtgaaatttccccagctgtgcaaattctgcgatgtgaggttttccacctgcgacaaccagaagtcctgtatgagcaactgcacaatcacctccatctgtgagaagcctcaggaggtgtgcgtggctgtctggcggaagaatgacgagaatatcaccctggaaaccgtctgccacgatcccaagctgccctaccacgatttcatcctggaagacgccgccagccctaagtgcatcatgaaagagaaaaagaagcctggcgagacctttttcatgtgctcctgcagcagcgacgaatgcaacgacaatatcatctttagcgaggaatacaataccagcaaccccgacatcacgtgtcctcctcctatgtccgtggaacacgcagacatctgggtcaagagctacagcttgtactccagggagcggtacatttgtaactctggtttcaagcgtaaagccggcacgtccagcctgacggagtgcgtgttgaacaaggccacgaatgtcgcccactggacaacccccagtctcaaatgtattaga

SEQ ID NO: 197 - DNA, 399 bp, Homo sapiens
  source: /note="IL21"
caaggtcaagatcgccacatgattagaatgcgtcaacttatagatattgttgatcagctgaaaaattatgtgaatgacttggtccctgaatttctgccagctccagaagatgtagagacaaactgtgagtggtcagctttttcctgttttcagaaggcccaactaaagtcagcaaatacaggaaacaatgaaaggataatcaatgtatcaattaaaaagctgaagaggaaaccaccttccacaaatgcagggagaagacagaaacacagactaacatgcccttcatgtgattcttatgagaaaaaaccacccaaagaattcctagaaagattcaaatcacttctccaaaagatgattcatcagcatctgtcctctagaacacacggaagtgaagattcc

SEQ ID NO: 198 - DNA, 456 bp, Homo sapiens
  source: /note="IL7"
gattgtgatattgaaggtaaagatggcaaacaatatgagagtgttctaatggtcagcatcgatcaattattggacagcatgaaagaaattggtagcaattgcctgaataatgaatttaacttttttaaaagacatatctgtgatgctaataaggaaggtatgtttttattccgtgctgctcgcaagttgaggcaatttcttaaaatgaatagcactggtgattttgatctccacttattaaaagtttcagaaggcacaacaatactgttgaactgcactggccaggttaaaggaagaaaaccagctgccctgggtgaagcccaaccaacaaagagtttggaagaaaataaatctttaaaggaacagaaaaaactgaatgacttgtgtttcctaaagagactattacaagagataaaaacttgttggaataaaattttgatgggcactaaagaacac

SEQ ID NO: 199 - protein, 466 aa, Artificial Sequence; identical to SEQ ID NO: 189
  source: /note="Description of Artificial Sequence: Synthetic 21t15-7s sequence"

SEQ ID NO: 200 - DNA, 1398 bp, Artificial Sequence
  source: /note="Description of Artificial Sequence: Synthetic 21t15-7s sequence"
caaggtcaagatcgccacatgattagaatgcgtcaacttatagatattgttgatcagctgaaaaattatgtgaatgacttggtccctgaatttctgccagctccagaagatgtagagacaaactgtgagtggtcagctttttcctgttttcagaaggcccaactaaagtcagcaaatacaggaaacaatgaaaggataatcaatgtatcaattaaaaagctgaagaggaaaccaccttccacaaatgcagggagaagacagaaacacagactaacatgcccttcatgtgattcttatgagaaaaaaccacccaaagaattcctagaaagattcaaatcacttctccaaaagatgattcatcagcatctgtcctctagaacacacggaagtgaagattcctcaggcactacaaatactgtggcagcatataatttaacttggaaatcaactaatttcaagacaattttggagtgggaacccaaacccgtcaatcaagtctacactgttcaaataagcactaagtcaggagattggaaaagcaaatgcttttacacaacagacacagagtgtgacctcaccgacgagattgtgaaggatgtgaagcagacgtacttggcacgggtcttctcctacccggcagggaatgtggagagcaccggttctgctggggagcctctgtatgagaactccccagagttcacaccttacctggagacaaacctcggacagccaacaattcagagttttgaacaggtgggaacaaaagtgaatgtgaccgtagaagatgaacggactttagtcagaaggaacaacactttcctaagcctccgggatgtttttggcaaggacttaatttatacactttattattggaaatcttcaagttcaggaaagaaaacagccaaaacaaacactaatgagtttttgattgatgtggataaaggagaaaactactgtttcagtgttcaagcagtgattccctcccgaacagttaaccggaagagtacagacagcccggtagagtgtatgggccaggagaaaggggaattcagagaaaactgggtgaacgtcatcagcgatttaaagaagatcgaagatttaattcagtccatgcatatcgacgccactttatacacagaatccgacgtgcacccctcttgtaaggtgaccgccatgaaatgttttttactggagctgcaagttatctctttagagagcggagacgctagcatccacgacaccgtggagaatttaatcattttagccaataactctttatccagcaacggcaacgtgacagagtccggctgcaaggagtgcgaagagctggaggagaagaacatcaaggagtttctgcaatcctttgtgcacattgtccagatgttcatcaatacctcc

SEQ ID NO: 201 - protein, 483 aa, Artificial Sequence
  source: /note="Description of Artificial Sequence: Synthetic 21t15-7s sequence"
MGVKVLFALICIAVAEAQGQDRHMIRMRQLIDIVDQLKNYVNDLVPEFLPAPEDVETNCEWSAFSCFQKAQLKSANTGNNERIINVSIKKLKRKPPSTNAGRRQKHRLTCPSCDSYEKKPPKEFLERFKSLLQKMIHQHLSSRTHGSEDSSGTTNTVAAYNLTWKSTNFKTILEWEPKPVNQVYTVQISTKSGDWKSKCFYTTDTECDLTDEIVKDVKQTYLARVFSYPAGNVESTGSAGEPLYENSPEFTPYLETNLGQPTIQSFEQVGTKVNVTVEDERTLVRRNNTFLSLRDVFGKDLIYTLYYWKSSSSGKKTAKTNTNEFLIDVDKGENYCFSVQAVIPSRTVNRKSTDSPVECMGQEKGEFRENWVNVISDLKKIEDLIQSMHIDATLYTESDVHPSCKVTAMKCFLLELQVISLESGDASIHDTVENLIILANNSLSSNGNVTESGCKECEELEEKNIKEFLQSFVHIVQMFINTS

SEQ ID NO: 202 - DNA, 1449 bp, Artificial Sequence
  source: /note="Description of Artificial Sequence: Synthetic 21t15-7s sequence"
atgggagtgaaagttctttttgcccttatttgtattgctgtggccgaggcccaaggtcaagatcgccacatgattagaatgcgtcaacttatagatattgttgatcagctgaaaaattatgtgaatgacttggtccctgaatttctgccagctccagaagatgtagagacaaactgtgagtggtcagctttttcctgttttcagaaggcccaactaaagtcagcaaatacaggaaacaatgaaaggataatcaatgtatcaattaaaaagctgaagaggaaaccaccttccacaaatgcagggagaagacagaaacacagactaacatgcccttcatgtgattcttatgagaaaaaaccacccaaagaattcctagaaagattcaaatcacttctccaaaagatgattcatcagcatctgtcctctagaacacacggaagtgaagattcctcaggcactacaaatactgtggcagcatataatttaacttggaaatcaactaatttcaagacaattttggagtgggaacccaaacccgtcaatcaagtctacactgttcaaataagcactaagtcaggagattggaaaagcaaatgcttttacacaacagacacagagtgtgacctcaccgacgagattgtgaaggatgtgaagcagacgtacttggcacgggtcttctcctacccggcagggaatgtggagagcaccggttctgctggggagcctctgtatgagaactccccagagttcacaccttacctggagacaaacctcggacagccaacaattcagagttttgaacaggtgggaacaaaagtgaatgtgaccgtagaagatgaacggactttagtcagaaggaacaacactttcctaagcctccgggatgtttttggcaaggacttaatttatacactttattattggaaatcttcaagttcaggaaagaaaacagccaaaacaaacactaatgagtttttgattgatgtggataaaggagaaaactactgtttcagtgttcaagcagtgattccctcccgaacagttaaccggaagagtacagacagcccggtagagtgtatgggccaggagaaaggggaattcagagaaaactgggtgaacgtcatcagcgatttaaagaagatcgaagatttaattcagtccatgcatatcgacgccactttatacacagaatccgacgtgcacccctcttgtaaggtgaccgccatgaaatgttttttactggagctgcaagttatctctttagagagcggagacgctagcatccacgacaccgtggagaatttaatcattttagccaataactctttatccagcaacggcaacgtgacagagtccggctgcaaggagtgcgaagagctggaggagaagaacatcaaggagtttctgcaatcctttgtgcacattgtccagatgttcatcaatacctcc

SEQ ID NO: 203 - protein, 217 aa, Artificial Sequence
  source: /note="Description of Artificial Sequence: Synthetic 21t15-7s sequence"
DCDIEGKDGKQYESVLMVSIDQLLDSMKEIGSNCLNNEFNFFKRHICDANKEGMFLFRAARKLRQFLKMNSTGDFDLHLLKVSEGTTILLNCTGQVKGRKPAALGEAQPTKSLEENKSLKEQKKLNDLCFLKRLLQEIKTCWNKILMGTKEHITCPPPMSVEHADIWVKSYSLYSRERYICNSGFKRKAGTSSLTECVLNKATNVAHWTTPSLKCIR

SEQ ID NO: 204 - DNA, 651 bp, Artificial Sequence
  source: /note="Description of Artificial Sequence: Synthetic 21t15-7s sequence"
gattgtgatattgaaggtaaagatggcaaacaatatgagagtgttctaatggtcagcatcgatcaattattggacagcatgaaagaaattggtagcaattgcctgaataatgaatttaacttttttaaaagacatatctgtgatgctaataaggaaggtatgtttttattccgtgctgctcgcaagttgaggcaatttcttaaaatgaatagcactggtgattttgatctccacttattaaaagtttcagaaggcacaacaatactgttgaactgcactggccaggttaaaggaagaaaaccagctgccctgggtgaagcccaaccaacaaagagtttggaagaaaataaatctttaaaggaacagaaaaaactgaatgacttgtgtttcctaaagagactattacaagagataaaaacttgttggaataaaattttgatgggcactaaagaacacatcacgtgccctccccccatgtccgtggaacacgcagacatctgggtcaagagctacagcttgtactccagggagcggtacatttgtaactctggtttcaagcgtaaagccggcacgtccagcctgacggagtgcgtgttgaacaaggccacgaatgtcgcccactggacaacccccagtctcaaatgcattaga

SEQ ID NO: 205 - protein, 234 aa, Artificial Sequence
  source: /note="Description of Artificial Sequence: Synthetic 21t15-7s sequence"
MGVKVLFALICIAVAEADCDIEGKDGKQYESVLMVSIDQLLDSMKEIGSNCLNNEFNFFKRHICDANKEGMFLFRAARKLRQFLKMNSTGDFDLHLLKVSEGTTILLNCTGQVKGRKPAALGEAQPTKSLEENKSLKEQKKLNDLCFLKRLLQEIKTCWNKILMGTKEHITCPPPMSVEHADIWVKSYSLYSRERYICNSGFKRKAGTSSLTECVLNKATNVAHWTTPSLKCIR

SEQ ID NO: 206 - DNA, 702 bp, Artificial Sequence
  source: /note="Description of Artificial Sequence: Synthetic 21t15-7s sequence"
atgggagtgaaagttctttttgcccttatttgtattgctgtggccgaggccgattgtgatattgaaggtaaagatggcaaacaatatgagagtgttctaatggtcagcatcgatcaattattggacagcatgaaagaaattggtagcaattgcctgaataatgaatttaacttttttaaaagacatatctgtgatgctaataaggaaggtatgtttttattccgtgctgctcgcaagttgaggcaatttcttaaaatgaatagcactggtgattttgatctccacttattaaaagtttcagaaggcacaacaatactgttgaactgcactggccaggttaaaggaagaaaaccagctgccctgggtgaagcccaaccaacaaagagtttggaagaaaataaatctttaaaggaacagaaaaaactgaatgacttgtgtttcctaaagagactattacaagagataaaaacttgttggaataaaattttgatgggcactaaagaacacatcacgtgccctccccccatgtccgtggaacacgcagacatctgggtcaagagctacagcttgtactccagggagcggtacatttgtaactctggtttcaagcgtaaagccggcacgtccagcctgacggagtgcgtgttgaacaaggccacgaatgtcgcccactggacaacccccagtctcaaatgcattaga

SEQ ID NO: 207 - protein, 485 aa, Artificial Sequence
  source: /note="Description of Artificial Sequence: Synthetic 7t15-21s sequence"
DCDIEGKDGKQYESVLMVSIDQLLDSMKEIGSNCLNNEFNFFKRHICDANKEGMFLFRAARKLRQFLKMNSTGDFDLHLLKVSEGTTILLNCTGQVKGRKPAALGEAQPTKSLEENKSLKEQKKLNDLCFLKRLLQEIKTCWNKILMGTKEHSGTTNTVAAYNLTWKSTNFKTILEWEPKPVNQVYTVQISTKSGDWKSKCFYTTDTECDLTDEIVKDVKQTYLARVFSYPAGNVESTGSAGEPLYENSPEFTPYLETNLGQPTIQSFEQVGTKVNVTVEDERTLVRRNNTFLSLRDVFGKDLIYTLYYWKSSSSGKKTAKTNTNEFLIDVDKGENYCFSVQAVIPSRTVNRKSTDSPVECMGQEKGEFRENWVNVISDLKKIEDLIQSMHIDATLYTESDVHPSCKVTAMKCFLLELQVISLESGDASIHDTVENLIILANNSLSSNGNVTESGCKECEELEEKNIKEFLQSFVHIVQMFINTS

SEQ ID NO: 208 - DNA, 1455 bp, Artificial Sequence
  source: /note="Description of Artificial Sequence: Synthetic 7t15-21s sequence"
gattgcgacatcgagggcaaggacggcaagcagtacgagagcgtgctgatggtgtccatcgaccagctgctggacagcatgaaggagatcggctccaactgcctcaacaacgagttcaacttcttcaagcggcacatctgcgacgccaacaaggagggcatgttcctgttcagggccgccaggaaactgcggcagttcctgaagatgaactccaccggcgacttcgacctgcacctgctgaaggtgtccgagggcaccaccatcctgctgaactgcaccggacaggtgaagggccggaaacctgctgctctgggagaggcccaacccaccaagagcctggaggagaacaagtccctgaaggagcagaagaagctgaacgacctgtgcttcctgaagaggctgctgcaggagatcaagacctgctggaacaagatcctgatgggcaccaaggagcatagcggcacaaccaacacagtcgctgcctataacctcacttggaagagcaccaacttcaaaaccatcctcgaatgggaacccaaacccgttaaccaagtttacaccgtgcagatcagcaccaagtccggcgactggaagtccaaatgtttctataccaccgacaccgagtgcgatctcaccgatgagatcgtgaaagatgtgaaacagacctacctcgcccgggtgtttagctaccccgccggcaatgtggagagcactggttccgctggcgagcctttatacgagaacagccccgaatttaccccttacctcgagaccaatttaggacagcccaccatccaaagctttgagcaagttggcacaaaggtgaatgtgacagtggaggacgagcggactttagtgcggcggaacaacacctttctcagcctccgggatgtgttcggcaaagatttaatctacacactgtattactggaagtcctcttcctccggcaagaagacagctaaaaccaacacaaacgagtttttaatcgacgtggataaaggcgaaaactactgtttcagcgtgcaagctgtgatcccctcccggaccgtgaataggaaaagcaccgatagccccgttgagtgcatgggccaagaaaagggcgagttccgggagaactgggtgaacgtcatcagcgatttaaagaagatcgaagatttaattcagtccatgcatatcgacgccactttatacacagaatccgacgtgcacccctcttgtaaggtgaccgccatgaaatgttttttactggagctgcaagttatctctttagagagcggagacgctagcatccacgacaccgtggagaatttaatcattttagccaataactctttatccagcaacggcaacgtgacagagtccggctgcaaggagtgcgaagagctggaggagaagaacatcaaggagtttctgcaatcctttgtgcacattgtccagatgttcatcaatacctcc

SEQ ID NO: 209 - protein, 503 aa, Artificial Sequence
  source: /note="Description of Artificial Sequence: Synthetic 7t15-21s sequence"
MKWVTFISLLFLFSSAYSDCDIEGKDGKQYESVLMVSIDQLLDSMKEIGSNCLNNEFNFFKRHICDANKEGMFLFRAARKLRQFLKMNSTGDFDLHLLKVSEGTTILLNCTGQVKGRKPAALGEAQPTKSLEENKSLKEQKKLNDLCFLKRLLQEIKTCWNKILMGTKEHSGTTNTVAAYNLTWKSTNFKTILEWEPKPVNQVYTVQISTKSGDWKSKCFYTTDTECDLTDEIVKDVKQTYLARVFSYPAGNVESTGSAGEPLYENSPEFTPYLETNLGQPTIQSFEQVGTKVNVTVEDERTLVRRNNTFLSLRDVFGKDLIYTLYYWKSSSSGKKTAKTNTNEFLIDVDKGENYCFSVQAVIPSRTVNRKSTDSPVECMGQEKGEFRENWVNVISDLKKIEDLIQSMHIDATLYTESDVHPSCKVTAMKCFLLELQVISLESGDASIHDTVENLIILANNSLSSNGNVTESGCKECEELEEKNIKEFLQSFVHIVQMFINTS

SEQ ID NO: 210 - DNA, 1509 bp, Artificial Sequence
  source: /note="Description of Artificial Sequence: Synthetic 7t15-21s sequence"
atgaagtgggtgaccttcatcagcctgctgttcctgttctccagcgcctactccgattgcgacatcgagggcaaggacggcaagcagtacgagagcgtgctgatggtgtccatcgaccagctgctggacagcatgaaggagatcggctccaactgcctcaacaacgagttcaacttcttcaagcggcacatctgcgacgccaacaaggagggcatgttcctgttcagggccgccaggaaactgcggcagttcctgaagatgaactccaccggcgacttcgacctgcacctgctgaaggtgtccgagggcaccaccatcctgctgaactgcaccggacaggtgaagggccggaaacctgctgctctgggagaggcccaacccaccaagagcctggaggagaacaagtccctgaaggagcagaagaagctgaacgacctgtgcttcctgaagaggctgctgcaggagatcaagacctgctggaacaagatcctgatgggcaccaaggagcatagcggcacaaccaacacagtcgctgcctataacctcacttggaagagcaccaacttcaaaaccatcctcgaatgggaacccaaacccgttaaccaagtttacaccgtgcagatcagcaccaagtccggcgactggaagtccaaatgtttctataccaccgacaccgagtgcgatctcaccgatgagatcgtgaaagatgtgaaacagacctacctcgcccgggtgtttagctaccccgccggcaatgtggagagcactggttccgctggcgagcctttatacgagaacagccccgaatttaccccttacctcgagaccaatttaggacagcccaccatccaaagctttgagcaagttggcacaaaggtgaatgtgacagtggaggacgagcggactttagtgcggcggaacaacacctttctcagcctccgggatgtgttcggcaaagatttaatctacacactgtattactggaagtcctcttcctccggcaagaagacagctaaaaccaacacaaacgagtttttaatcgacgtggataaaggcgaaaactactgtttcagcgtgcaagctgtgatcccctcccggaccgtgaataggaaaagcaccgatagccccgttgagtgcatgggccaagaaaagggcgagttccgggagaactgggtgaacgtcatcagcgatttaaagaagatcgaagatttaattcagtccatgcatatcgacgccactttatacacagaatccgacgtgcacccctcttgtaaggtgaccgccatgaaatgttttttactggagctgcaagttatctctttagagagcggagacgctagcatccacgacaccgtggagaatttaatcattttagccaataactctttatccagcaacggcaacgtgacagagtccggctgcaaggagtgcgaagagctggaggagaagaacatcaaggagtttctgcaatcctttgtgcacattgtccagatgttcatcaatacctcc

SEQ ID NO: 211 - protein, 198 aa, Artificial Sequence
  source: /note="Description of Artificial Sequence: Synthetic 7t15-21s sequence"
QGQDRHMIRMRQLIDIVDQLKNYVNDLVPEFLPAPEDVETNCEWSAFSCFQKAQLKSANTGNNERIINVSIKKLKRKPPSTNAGRRQKHRLTCPSCDSYEKKPPKEFLERFKSLLQKMIHQHLSSRTHGSEDSITCPPPMSVEHADIWVKSYSLYSRERYICNSGFKRKAGTSSLTECVLNKATNVAHWTTPSLKCIR

SEQ ID NO: 212 - DNA, 594 bp, Artificial Sequence
  source: /note="Description of Artificial Sequence: Synthetic 7t15-21s sequence"
cagggccaggacaggcacatgatccggatgaggcagctcatcgacatcgtcgaccagctgaagaactacgtgaacgacctggtgcccgagtttctgcctgcccccgaggacgtggagaccaactgcgagtggtccgccttctcctgctttcagaaggcccagctgaagtccgccaacaccggcaacaacgagcggatcatcaacgtgagcatcaagaagctgaagcggaagcctccctccacaaacgccggcaggaggcagaagcacaggctgacctgccccagctgtgactcctacgagaagaagccccccaaggagttcctggagaggttcaagtccctgctgcagaagatgatccatcagcacctgtcctccaggacccacggctccgaggactccattacatgcccccctcccatgagcgtggagcacgccgacatctgggtgaagagctatagcctctacagccgggagaggtatatctgtaacagcggcttcaagaggaaggccggcaccagcagcctcaccgagtgcgtgctgaataaggctaccaacgtggctcactggacaacaccctctttaaagtgcatccgg

SEQ ID NO: 213 - protein, 216 aa, Artificial Sequence
  source: /note="Description of Artificial Sequence: Synthetic 7t15-21s sequence"
MKWVTFISLLFLFSSAYSQGQDRHMIRMRQLIDIVDQLKNYVNDLVPEFLPAPEDVETNCEWSAFSCFQKAQLKSANTGNNERIINVSIKKLKRKPPSTNAGRRQKHRLTCPSCDSYEKKPPKEFLERFKSLLQKMIHQHLSSRTHGSEDSITCPPPMSVEHADIWVKSYSLYSRERYICNSGFKRKAGTSSLTECVLNKATNVAHWTTPSLKCIR

SEQ ID NO: 214 - DNA, 648 bp, Artificial Sequence
  source: /note="Description of Artificial Sequence: Synthetic 7t15-21s sequence"
atgaagtgggtgaccttcatcagcctgctgttcctgttctccagcgcctactcccagggccaggacaggcacatgatccggatgaggcagctcatcgacatcgtcgaccagctgaagaactacgtgaacgacctggtgcccgagtttctgcctgcccccgaggacgtggagaccaactgcgagtggtccgccttctcctgctttcagaaggcccagctgaagtccgccaacaccggcaacaacgagcggatcatcaacgtgagcatcaagaagctgaagcggaagcctccctccacaaacgccggcaggaggcagaagcacaggctgacctgccccagctgtgactcctacgagaagaagccccccaaggagttcctggagaggttcaagtccctgctgcagaagatgatccatcagcacctgtcctccaggacccacggctccgaggactccattacatgcccccctcccatgagcgtggagcacgccgacatctgggtgaagagctatagcctctacagccgggagaggtatatctgtaacagcggcttcaagaggaaggccggcaccagcagcctcaccgagtgcgtgctgaataaggctaccaacgtggctcactggacaacaccctctttaaagtgcatccgg

SEQ ID NO: 215 - protein, 108 aa, Homo sapiens
  source: /note="CD16"
SELTQDPAVSVALGQTVRITCQGDSLRSYYASWYQQKPGQAPVLVIYGKNNRPSGIPDRFSGSSSGNTASLTITGAQAEDEADYYCNSRDSSGNHVVFGGGTKLTVGH

SEQ ID NO: 216 - DNA, 324 bp, Homo sapiens
  source: /note="CD16"
tccgagctgacccaggaccctgctgtgtccgtggctctgggccagaccgtgaggatcacctgccagggcgactccctgaggtcctactacgcctcctggtaccagcagaagcccggccaggctcctgtgctggtgatctacggcaagaacaacaggccctccggcatccctgacaggttctccggatcctcctccggcaacaccgcctccctgaccatcacaggcgctcaggccgaggacgaggctgactactactgcaactccagggactcctccggcaaccatgtggtgttcggcggcggcaccaagctgaccgtgggccat

SEQ ID NO: 217 - protein, 117 aa, Homo sapiens
  source: /note="CD16"
EVQLVESGGGVVRPGGSLRLSCAASGFTFDDYGMSWVRQAPGKGLEWVSGINWNGGSTGYADSVKGRFTISRDNAKNSLYLQMNSLRAEDTAVYYCARGRSLLFDYWGQGTLVTVSR

SEQ ID NO: 218 - DNA, 351 bp, Homo sapiens
  source: /note="CD16"
gaggtgcagctggtggagtccggaggaggagtggtgaggcctggaggctccctgaggctgagctgtgctgcctccggcttcaccttcgacgactacggcatgtcctgggtgaggcaggctcctggaaagggcctggagtgggtgtccggcatcaactggaacggcggatccaccggctacgccgattccgtgaagggcaggttcaccatcagcagggacaacgccaagaactccctgtacctgcagatgaactccctgagggccgaggacaccgccgtgtactactgcgccaggggcaggtccctgctgttcgactactggggacagggcaccctggtgaccgtgtccagg

SEQ ID NO: 219-222 - skipped (4 entries)

SEQ ID NO: 223 - protein, 823 aa, Artificial Sequence
  source: /note="Description of Artificial Sequence: Synthetic 18t15-12s16 sequence"
IWELKKDVYVVELDWYPDAPGEMVVLTCDTPEEDGITWTLDQSSEVLGSGKTLTIQVKEFGDAGQYTCHKGGEVLSHSLLLLHKKEDGIWSTDILKDQKEPKNKTFLRCEAKNYSGRFTCWWLTTISTDLTFSVKSSRGSSDPQGVTCGAATLSAERVRGDNKEYEYSVECQEDSACPAAEESLPIEVMVDAVHKLKYENYTSSFFIRDIIKPDPPKNLQLKPLKNSRQVEVSWEYPDTWSTPHSYFSLTFCVQVQGKSKREKKDRVFTDKTSATVICRKNASISVRAQDRYYSSSWSEWASVPCSGGGGSGGGGSGGGGSRNLPVATPDPGMFPCLHHSQNLLRAVSNMLQKARQTLEFYPCTSEEIDHEDITKDKTSTVEACLPLELTKNESCLNSRETSFITNGSCLASRKTSFMMALCLSSIYEDLKMYQVEFKTMNAKLLMDPKRQIFLDQNMLAVIDELMQALNFNSETVPQKSSLEEPDFYKTKIKLCILLHAFRIRAVTIDRVMSYLNASITCPPPMSVEHADIWVKSYSLYSRERYICNSGFKRKAGTSSLTECVLNKATNVAHWTTPSLKCIRSELTQDPAVSVALGQTVRITCQGDSLRSYYASWYQQKPGQAPVLVIYGKNNRPSGIPDRFSGSSSGNTASLTITGAQAEDEADYYCNSRDSSGNHVVFGGGTKLTVGHGGGGSGGGGSGGGGSEVQLVESGGGVVRPGGSLRLSCAASGFTFDDYGMSWVRQAPGKGLEWVSGINWNGGSTGYADSVKGRFTISRDNAKNSLYLQMNSLRAEDTAVYYCARGRSLLFDYWGQGTLVTVSR

SEQ ID NO: 224 - DNA, 2469 bp, Artificial Sequence
  source: /note="Description of Artificial Sequence: Synthetic 18t15-12s16 sequence"
atttgggaactgaagaaggacgtctacgtggtcgaactggactggtatcccgatgctcccggcgaaatggtggtgctcacttgtgacacccccgaagaagacggcatcacttggaccctcgatcagagcagcgaggtgctgggctccggaaagaccctcacaatccaagttaaggagttcggagacgctggccaatacacatgccacaagggaggcgaggtgctcagccattccttattattattacacaagaaggaagacggaatctggtccaccgacattttaaaagatcagaaggagcccaagaataagacctttttaaggtgtgaggccaaaaactacagcggtcgtttcacttgttggtggctgaccaccatttccaccgatttaaccttctccgtgaaaagcagccggggaagctccgaccctcaaggtgtgacatgtggagccgctaccctcagcgctgagagggttcgtggcgataacaaggaatacgagtacagcgtggagtgccaagaagatagcgcttgtcccgctgccgaagaatctttacccattgaggtgatggtggacgccgtgcacaaactcaagtacgagaactacacctcctccttctttatccgggacatcattaagcccgatcctcctaagaatttacagctgaagcctctcaaaaatagccggcaagttgaggtctcttgggaatatcccgacacttggagcacaccccacagctacttctctttaaccttttgtgtgcaagttcaaggtaaaagcaagcgggagaagaaagaccgggtgtttaccgacaaaaccagcgccaccgtcatctgtcggaagaacgcctccatcagcgtgagggctcaagatcgttattactccagcagctggtccgagtgggccagcgtgccttgttccggcggtggaggatccggaggaggtggctccggcggcggaggatctcgtaacctccccgtggctacccccgatcccggaatgttcccttgtttacaccacagccagaatttactgagggccgtgagcaacatgctgcagaaagctaggcagactttagaattttacccttgcaccagcgaggagatcgaccatgaagatatcaccaaggacaagacatccaccgtggaggcttgtttacctctggagctgacaaagaacgagtcttgtctcaactctcgtgaaaccagcttcatcacaaatggctcttgtttagcttcccggaagacctcctttatgatggctttatgcctcagctccatctacgaggatttaaagatgtaccaagtggagttcaagaccatgaacgccaagctgctcatggaccctaaacggcagatctttttagaccagaacatgctggctgtgattgatgagctgatgcaagctttaaacttcaactccgagaccgtccctcagaagtcctccctcgaggagcccgatttttacaagacaaagatcaaactgtgcattttactccacgcctttaggatccgggccgtgaccattgaccgggtcatgagctatttaaacgccagcattacatgcccccctcccatgagcgtggagcacgccgacatctgggtgaagagctatagcctctacagccgggagaggtatatctgtaacagcggcttcaagaggaaggccggcaccagcagcctcaccgagtgcgtgctgaataaggctaccaacgtggctcactggacaacaccctctttaaagtgcatccggtccgagctgacccaggaccctgctgtgtccgtggctctgggccagaccgtgaggatcacctgccagggcgactccctgaggtcctactacgcctcctggtaccagcagaagcccggccaggctcctgtgctggtgatctacggcaagaacaacaggccctccggcatccctgacaggttctccggatcctcctccggcaacaccgcctccctgaccatcacaggcgctcaggccgaggacgaggctgactactactgcaactccagggactcctccggcaaccatgtggtgttcggcggcggcaccaagctgaccgtgggccatggcggcggcggctccggaggcggcggcagcggcggaggaggatccgaggtgcagctggtggagtccggaggaggagtggtgaggcctggaggctccctgaggctgagctgtgctgcctccggcttcaccttcgacgactacggcatgtcctgggtgaggcaggctcctggaaagggcctggagtgggtgtccggcatcaactggaacggcggatccaccggctacgccgattccgtgaagggcaggttcaccatcagcagggacaacgccaagaactccctgtacctgcagatgaactccctgagggccgaggacaccgccgtgtactactgcgccaggggcaggtccctgctgttcgactactggggacagggcaccctggtgaccgtgtccagg

SEQ ID NO: 225 - protein, 841 aa, Artificial Sequence
  source: /note="Description of Artificial Sequence: Synthetic 18t15-12s16 sequence"
MKWVTFISLLFLFSSAYSIWELKKDVYVVELDWYPDAPGEMVVLTCDTPEEDGITWTLDQSSEVLGSGKTLTIQVKEFGDAGQYTCHKGGEVLSHSLLLLHKKEDGIWSTDILKDQKEPKNKTFLRCEAKNYSGRFTCWWLTTISTDLTFSVKSSRGSSDPQGVTCGAATLSAERVRGDNKEYEYSVECQEDSACPAAEESLPIEVMVDAVHKLKYENYTSSFFIRDIIKPDPPKNLQLKPLKNSRQVEVSWEYPDTWSTPHSYFSLTFCVQVQGKSKREKKDRVFTDKTSATVICRKNASISVRAQDRYYSSSWSEWASVPCSGGGGSGGGGSGGGGSRNLPVATPDPGMFPCLHHSQNLLRAVSNMLQKARQTLEFYPCTSEEIDHEDITKDKTSTVEACLPLELTKNESCLNSRETSFITNGSCLASRKTSFMMALCLSSIYEDLKMYQVEFKTMNAKLLMDPKRQIFLDQNMLAVIDELMQALNFNSETVPQKSSLEEPDFYKTKIKLCILLHAFRIRAVTIDRVMSYLNASITCPPPMSVEHADIWVKSYSLYSRERYICNSGFKRKAGTSSLTECVLNKATNVAHWTTPSLKCIRSELTQDPAVSVALGQTVRITCQGDSLRSYYASWYQQKPGQAPVLVIYGKNNRPSGIPDRFSGSSSGNTASLTITGAQAEDEADYYCNSRDSSGNHVVFGGGTKLTVGHGGGGSGGGGSGGGGSEVQLVESGGGVVRPGGSLRLSCAASGFTFDDYGMSWVRQAPGKGLEWVSGINWNGGSTGYADSVKGRFTISRDNAKNSLYLQMNSLRAEDTAVYYCARGRSLLFDYWGQGTLVTVSR

SEQ ID NO: 226 - DNA, 2523 bp, Artificial Sequence
  source: /note="Description of Artificial Sequence: Synthetic 18t15-12s16 sequence"
atgaaatgggtgacctttatttctttactgttcctctttagcagcgcctactccatttgggaactgaagaaggacgtctacgtggtcgaactggactggtatcccgatgctcccggcgaaatggtggtgctcacttgtgacacccccgaagaagacggcatcacttggaccctcgatcagagcagcgaggtgctgggctccggaaagaccctcacaatccaagttaaggagttcggagacgctggccaatacacatgccacaagggaggcgaggtgctcagccattccttattattattacacaagaaggaagacggaatctggtccaccgacattttaaaagatcagaaggagcccaagaataagacctttttaaggtgtgaggccaaaaactacagcggtcgtttcacttgttggtggctgaccaccatttccaccgatttaaccttctccgtgaaaagcagccggggaagctccgaccctcaaggtgtgacatgtggagccgctaccctcagcgctgagagggttcgtggcgataacaaggaatacgagtacagcgtggagtgccaagaagatagcgcttgtcccgctgccgaagaatctttacccattgaggtgatggtggacgccgtgcacaaactcaagtacgagaactacacctcctccttctttatccgggacatcattaagcccgatcctcctaagaatttacagctgaagcctctcaaaaatagccggcaagttgaggtctcttgggaatatcccgacacttggagcacaccccacagctacttctctttaaccttttgtgtgcaagttcaaggtaaaagcaagcgggagaagaaagaccgggtgtttaccgacaaaaccagcgccaccgtcatctgtcggaagaacgcctccatcagcgtgagggctcaagatcgttattactccagcagctggtccgagtgggccagcgtgccttgttccggcggtggaggatccggaggaggtggctccggcggcggaggatctcgtaacctccccgtggctacccccgatcccggaatgttcccttgtttacaccacagccagaatttactgagggccgtgagcaacatgctgcagaaagctaggcagactttagaattttacccttgcaccagcgaggagatcgaccatgaagatatcaccaaggacaagacatccaccgtggaggcttgtttacctctggagctgacaaagaacgagtcttgtctcaactctcgtgaaaccagcttcatcacaaatggctcttgtttagcttcccggaagacctcctttatgatggctttatgcctcagctccatctacgaggatttaaagatgtaccaagtggagttcaagaccatgaacgccaagctgctcatggaccctaaacggcagatctttttagaccagaacatgctggctgtgattgatgagctgatgcaagctttaaacttcaactccgagaccgtccctcagaagtcctccctcgaggagcccgatttttacaagacaaagatcaaactgtgcattttactccacgcctttaggatccgggccgtgaccattgaccgggtcatgagctatttaaacgccagcattacatgcccccctcccatgagcgtggagcacgccgacatctgggtgaagagctatagcctctacagccgggagaggtatatctgtaacagcggcttcaagaggaaggccggcaccagcagcctcaccgagtgcgtgctgaataaggctaccaacgtggctcactggacaacaccctctttaaagtgcatccggtccgagctgacccaggaccctgctgtgtccgtggctctgggccagaccgtgaggatcacctgccagggcgactccctgaggtcctactacgcctcctggtaccagcagaagcccggccaggctcctgtgctggtgatctacggcaagaacaacaggccctccggcatccctgacaggttctccggatcctcctccggcaacaccgcctccctgaccatcacaggcgctcaggccgaggacgaggctgactactactgcaactccagggactcctccggcaaccatgtggtgttcggcggcggcaccaagctgaccgtgggccatggcggcggcggctccggaggcggcggcagcggcggaggaggatccgaggtgcagctggtggagtccggaggaggagtggtgaggcctggaggctccctgaggctgagctgtgctgcctccggcttcaccttcgacgactacggcatgtcctgggtgaggcaggctcctggaaagggcctggagtgggtgtccggcatcaactggaacggcggatccaccggctacgccgattccgtgaagggcaggttcaccatcagcagggacaacgccaagaactccctgtacctgcagatgaactccctgagggccgaggacaccgccgtgtactactgcgccaggggcaggtccctgctgttcgactactggggacagggcaccctggtgaccgtgtccagg

SEQ ID NO: 227 - DNA, 456 bp, Homo sapiens
  source: /note="IL7"
gattgcgacatcgagggcaaggacggcaagcagtacgagagcgtgctgatggtgtccatcgaccagctgctggacagcatgaaggagatcggctccaactgcctcaacaacgagttcaacttcttcaagcggcacatctgcgacgccaacaaggagggcatgttcctgttcagggccgccaggaaactgcggcagttcctgaagatgaactccaccggcgacttcgacctgcacctgctgaaggtgtccgagggcaccaccatcctgctgaactgcaccggacaggtgaagggccggaaacctgctgctctgggagaggcccaacccaccaagagcctggaggagaacaagtccctgaaggagcagaagaagctgaacgacctgtgcttcctgaagaggctgctgcaggagatcaagacctgctggaacaagatcctgatgggcaccaaggagcat

SEQ ID NO: 228-231 - skipped (4 entries)

SEQ ID NO: 232 - protein, 438 aa, Artificial Sequence
  source: /note="Description of Artificial Sequence: Synthetic 7t15-16s21 sequence"
SELTQDPAVSVALGQTVRITCQGDSLRSYYASWYQQKPGQAPVLVIYGKNNRPSGIPDRFSGSSSGNTASLTITGAQAEDEADYYCNSRDSSGNHVVFGGGTKLTVGHGGGGSGGGGSGGGGSEVQLVESGGGVVRPGGSLRLSCAASGFTFDDYGMSWVRQAPGKGLEWVSGINWNGGSTGYADSVKGRFTISRDNAKNSLYLQMNSLRAEDTAVYYCARGRSLLFDYWGQGTLVTVSRITCPPPMSVEHADIWVKSYSLYSRERYICNSGFKRKAGTSSLTECVLNKATNVAHWTTPSLKCIRQGQDRHMIRMRQLIDIVDQLKNYVNDLVPEFLPAPEDVETNCEWSAFSCFQKAQLKSANTGNNERIINVSIKKLKRKPPSTNAGRRQKHRLTCPSCDSYEKKPPKEFLERFKSLLQKMIHQHLSSRTHGSEDS

SEQ ID NO: 233 - DNA, 1314 bp, Artificial Sequence
  source: /note="Description of Artificial Sequence: Synthetic 7t15-16s21 sequence"
tccgagctgacccaggaccctgctgtgtccgtggctctgggccagaccgtgaggatcacctgccagggcgactccctgaggtcctactacgcctcctggtaccagcagaagcccggccaggctcctgtgctggtgatctacggcaagaacaacaggccctccggcatccctgacaggttctccggatcctcctccggcaacaccgcctccctgaccatcacaggcgctcaggccgaggacgaggctgactactactgcaactccagggactcctccggcaaccatgtggtgttcggcggcggcaccaagctgaccgtgggccatggcggcggcggctccggaggcggcggcagcggcggaggaggatccgaggtgcagctggtggagtccggaggaggagtggtgaggcctggaggctccctgaggctgagctgtgctgcctccggcttcaccttcgacgactacggcatgtcctgggtgaggcaggctcctggaaagggcctggagtgggtgtccggcatcaactggaacggcggatccaccggctacgccgattccgtgaagggcaggttcaccatcagcagggacaacgccaagaactccctgtacctgcagatgaactccctgagggccgaggacaccgccgtgtactactgcgccaggggcaggtccctgctgttcgactactggggacagggcaccctggtgaccgtgtccaggattacatgcccccctcccatgagcgtggagcacgccgacatctgggtgaagagctatagcctctacagccgggagaggtatatctgtaacagcggcttcaagaggaaggccggcaccagcagcctcaccgagtgcgtgctgaataaggctaccaacgtggctcactggacaacaccctctttaaagtgcatccggcagggccaggacaggcacatgatccggatgaggcagctcatcgacatcgtcgaccagctgaagaactacgtgaacgacctggtgcccgagtttctgcctgcccccgaggacgtggagaccaactgcgagtggtccgccttctcctgctttcagaaggcccagctgaagtccgccaacaccggcaacaacgagcggatcatcaacgtgagcatcaagaagctgaagcggaagcctccctccacaaacgccggcaggaggcagaagcacaggctgacctgccccagctgtgactcctacgagaagaagccccccaaggagttcctggagaggttcaagtccctgctgcagaagatgatccatcagcacctgtcctccaggacccacggctccgaggactcc

SEQ ID NO: 234 - protein, 456 aa, Artificial Sequence
  source: /note="Description of Artificial Sequence: Synthetic 7t15-16s21 sequence"
MKWVTFISLLFLFSSAYSSELTQDPAVSVALGQTVRITCQGDSLRSYYASWYQQKPGQAPVLVIYGKNNRPSGIPDRFSGSSSGNTASLTITGAQAEDEADYYCNSRDSSGNHVVFGGGTKLTVGHGGGGSGGGGSGGGGSEVQLVESGGGVVRPGGSLRLSCAASGFTFDDYGMSWVRQAPGKGLEWVSGINWNGGSTGYADSVKGRFTISRDNAKNSLYLQMNSLRAEDTAVYYCARGRSLLFDYWGQGTLVTVSRITCPPPMSVEHADIWVKSYSLYSRERYICNSGFKRKAGTSSLTECVLNKATNVAHWTTPSLKCIRQGQDRHMIRMRQLIDIVDQLKNYVNDLVPEFLPAPEDVETNCEWSAFSCFQKAQLKSANTGNNERIINVSIKKLKRKPPSTNAGRRQKHRLTCPSCDSYEKKPPKEFLERFKSLLQKMIHQHLSSRTHGSEDS

SEQ ID NO: 235 - DNA, 1368 bp, Artificial Sequence
  source: /note="Description of Artificial Sequence: Synthetic 7t15-16s21 sequence"
atgaagtgggtgaccttcatcagcctgctgttcctgttctccagcgcctactcctccgagctgacccaggaccctgctgtgtccgtggctctgggccagaccgtgaggatcacctgccagggcgactccctgaggtcctactacgcctcctggtaccagcagaagcccggccaggctcctgtgctggtgatctacggcaagaacaacaggccctccggcatccctgacaggttctccggatcctcctccggcaacaccgcctccctgaccatcacaggcgctcaggccgaggacgaggctgactactactgcaactccagggactcctccggcaaccatgtggtgttcggcggcggcaccaagctgaccgtgggccatggcggcggcggctccggaggcggcggcagcggcggaggaggatccgaggtgcagctggtggagtccggaggaggagtggtgaggcctggaggctccctgaggctgagctgtgctgcctccggcttcaccttcgacgactacggcatgtcctgggtgaggcaggctcctggaaagggcctggagtgggtgtccggcatcaactggaacggcggatccaccggctacgccgattccgtgaagggcaggttcaccatcagcagggacaacgccaagaactccctgtacctgcagatgaactccctgagggccgaggacaccgccgtgtactactgcgccaggggcaggtccctgctgttcgactactggggacagggcaccctggtgaccgtgtccaggattacatgcccccctcccatgagcgtggagcacgccgacatctgggtgaagagctatagcctctacagccgggagaggtatatctgtaacagcggcttcaagaggaaggccggcaccagcagcctcaccgagtgcgtgctgaataaggctaccaacgtggctcactggacaacaccctctttaaagtgcatccggcagggccaggacaggcacatgatccggatgaggcagctcatcgacatcgtcgaccagctgaagaactacgtgaacgacctggtgcccgagtttctgcctgcccccgaggacgtggagaccaactgcgagtggtccgccttctcctgctttcagaaggcccagctgaagtccgccaacaccggcaacaacgagcggatcatcaacgtgagcatcaagaagctgaagcggaagcctccctccacaaacgccggcaggaggcagaagcacaggctgacctgccccagctgtgactcctacgagaagaagccccccaaggagttcctggagaggttcaagtccctgctgcagaagatgatccatcagcacctgtcctccaggacccacggctccgaggactcc

SEQ ID NO: 236 - protein, 620 aa, Artificial Sequence
  source: /note="Description of Artificial Sequence: Synthetic TGFRt15-16s21 sequence"
IPPHVQKSVNNDMIVTDNNGAVKFPQLCKFCDVRFSTCDNQKSCMSNCSITSICEKPQEVCVAVWRKNDENITLETVCHDPKLPYHDFILEDAASPKCIMKEKKKPGETFFMCSCSSDECNDNIIFSEEYNTSNPDGGGGSGGGGSGGGGSIPPHVQKSVNNDMIVTDNNGAVKFPQLCKFCDVRFSTCDNQKSCMSNCSITSICEKPQEVCVAVWRKNDENITLETVCHDPKLPYHDFILEDAASPKCIMKEKKKPGETFFMCSCSSDECNDNIIFSEEYNTSNPDSGTTNTVAAYNLTWKSTNFKTILEWEPKPVNQVYTVQISTKSGDWKSKCFYTTDTECDLTDEIVKDVKQTYLARVFSYPAGNVESTGSAGEPLYENSPEFTPYLETNLGQPTIQSFEQVGTKVNVTVEDERTLVRRNNTFLSLRDVFGKDLIYTLYYWKSSSSGKKTAKTNTNEFLIDVDKGENYCFSVQAVIPSRTVNRKSTDSPVECMGQEKGEFRENWVNVISDLKKIEDLIQSMHIDATLYTESDVHPSCKVTAMKCFLLELQVISLESGDASIHDTVENLIILANNSLSSNGNVTESGCKECEELEEKNIKEFLQSFVHIVQMFINTS

SEQ ID NO: 237 - DNA, 1860 bp, Artificial Sequence
  source: /note="Description of Artificial Sequence: Synthetic TGFRt15-16s21 sequence"
atccccccccatgtgcaaaagagcgtgaacaacgatatgatcgtgaccgacaacaacggcgccgtgaagtttccccagctctgcaagttctgcgatgtcaggttcagcacctgcgataatcagaagtcctgcatgtccaactgcagcatcacctccatctgcgagaagccccaagaagtgtgcgtggccgtgtggcggaaaaatgacgagaacatcaccctggagaccgtgtgtcacgaccccaagctcccttatcacgacttcattctggaggacgctgcctcccccaaatgcatcatgaaggagaagaagaagcccggagagaccttctttatgtgttcctgtagcagcgacgagtgtaacgacaacatcatcttcagcgaagagtacaacaccagcaaccctgatggaggtggcggatccggaggtggaggttctggtggaggtgggagtattcctccccacgtgcagaagagcgtgaataatgacatgatcgtgaccgataacaatggcgccgtgaaatttccccagctgtgcaaattctgcgatgtgaggttttccacctgcgacaaccagaagtcctgtatgagcaactgctccatcacctccatctgtgagaagcctcaggaggtgtgcgtggctgtctggcggaagaatgacgagaatatcaccctggaaaccgtctgccacgatcccaagctgccctaccacgatttcatcctggaagacgccgccagccctaagtgcatcatgaaagagaaaaagaagcctggcgagacctttttcatgtgctcctgcagcagcgacgaatgcaacgacaatatcatctttagcgaggaatacaataccagcaaccccgacagcggcacaaccaacacagtcgctgcctataacctcacttggaagagcaccaacttcaaaaccatcctcgaatgggaacccaaacccgttaaccaagtttacaccgtgcagatcagcaccaagtccggcgactggaagtccaaatgtttctataccaccgacaccgagtgcgatctcaccgatgagatcgtgaaagatgtgaaacagacctacctcgcccgggtgtttagctaccccgccggcaatgtggagagcactggttccgctggcgagcctttatacgagaacagccccgaatttaccccttacctcgagaccaatttaggacagcccaccatccaaagctttgagcaagttggcacaaaggtgaatgtgacagtggaggacgagcggactttagtgcggcggaacaacacctttctcagcctccgggatgtgttcggcaaagatttaatctacacactgtattactggaagtcctcttcctccggcaagaagacagctaaaaccaacacaaacgagtttttaatcgacgtggataaaggcgaaaactactgtttcagcgtgcaagctgtgatcccctcccggaccgtgaataggaaaagcaccgatagccccgttgagtgcatgggccaagaaaagggcgagttccgggagaactgggtgaacgtcatcagcgatttaaagaagatcgaagatttaattcagtccatgcatatcgacgccactttatacacagaatccgacgtgcacccctcttgtaaggtgaccgccatgaaatgttttttactggagctgcaagttatctctttagagagcggagacgctagcatccacgacaccgtggagaatttaatcattttagccaataactctttatccagcaacggcaacgtgacagagtccggctgcaaggagtgcgaagagctggaggagaagaacatcaaggagtttctgcaatcctttgtgcacattgtccagatgttcatcaatacctcc

SEQ ID NO: 238 - protein, 638 aa, Artificial Sequence
  source: /note="Description of Artificial Sequence: Synthetic TGFRt15-16s21 sequence"
MKWVTFISLLFLFSSAYSIPPHVQKSVNNDMIVTDNNGAVKFPQLCKFCDVRFSTCDNQKSCMSNCSITSICEKPQEVCVAVWRKNDENITLETVCHDPKLPYHDFILEDAASPKCIMKEKKKPGETFFMCSCSSDECNDNIIFSEEYNTSNPDGGGGSGGGGSGGGGSIPPHVQKSVNNDMIVTDNNGAVKFPQLCKFCDVRFSTCDNQKSCMSNCSITSICEKPQEVCVAVWRKNDENITLETVCHDPKLPYHDFILEDAASPKCIMKEKKKPGETFFMCSCSSDECNDNIIFSEEYNTSNPDSGTTNTVAAYNLTWKSTNFKTILEWEPKPVNQVYTVQISTKSGDWKSKCFYTTDTECDLTDEIVKDVKQTYLARVFSYPAGNVESTGSAGEPLYENSPEFTPYLETNLGQPTIQSFEQVGTKVNVTVEDERTLVRRNNTFLSLRDVFGKDLIYTLYYWKSSSSGKKTAKTNTNEFLIDVDKGENYCFSVQAVIPSRTVNRKSTDSPVECMGQEKGEFRENWVNVISDLKKIEDLIQSMHIDATLYTESDVHPSCKVTAMKCFLLELQVISLESGDASIHDTVENLIILANNSLSSNGNVTESGCKECEELEEKNIKEFLQSFVHIVQMFINTS

SEQ ID NO: 239 - DNA, 1914 bp, Artificial Sequence
  source: /note="Description of Artificial Sequence: Synthetic TGFRt15-16s21 sequence"
atgaagtgggtgaccttcatcagcctgctgttcctgttctccagcgcctactccatccccccccatgtgcaaaagagcgtgaacaacgatatgatcgtgaccgacaacaacggcgccgtgaagtttccccagctctgcaagttctgcgatgtcaggttcagcacctgcgataatcagaagtcctgcatgtccaactgcagcatcacctccatctgcgagaagccccaagaagtgtgcgtggccgtgtggcggaaaaatgacgagaacatcaccctggagaccgtgtgtcacgaccccaagctcccttatcacgacttcattctggaggacgctgcctcccccaaatgcatcatgaaggagaagaagaagcccggagagaccttctttatgtgttcctgtagcagcgacgagtgtaacgacaacatcatcttcagcgaagagtacaacaccagcaaccctgatggaggtggcggatccggaggtggaggttctggtggaggtgggagtattcctccccacgtgcagaagagcgtgaataatgacatgatcgtgaccgataacaatggcgccgtgaaatttccccagctgtgcaaattctgcgatgtgaggttttccacctgcgacaaccagaagtcctgtatgagcaactgctccatcacctccatctgtgagaagcctcaggaggtgtgcgtggctgtctggcggaagaatgacgagaatatcaccctggaaaccgtctgccacgatcccaagctgccctaccacgatttcatcctggaagacgccgccagccctaagtgcatcatgaaagagaaaaagaagcctggcgagacctttttcatgtgctcctgcagcagcgacgaatgcaacgacaatatcatctttagcgaggaatacaataccagcaaccccgacagcggcacaaccaacacagtcgctgcctataacctcacttggaagagcaccaacttcaaaaccatcctcgaatgggaacccaaacccgttaaccaagtttacaccgtgcagatcagcaccaagtccggcgactggaagtccaaatgtttctataccaccgacaccgagtgcgatctcaccgatgagatcgtgaaagatgtgaaacagacctacctcgcccgggtgtttagctaccccgccggcaatgtggagagcactggttccgctggcgagcctttatacgagaacagccccgaatttaccccttacctcgagaccaatttaggacagcccaccatccaaagctttgagcaagttggcacaaaggtgaatgtgacagtggaggacgagcggactttagtgcggcggaacaacacctttctcagcctccgggatgtgttcggcaaagatttaatctacacactgtattactggaagtcctcttcctccggcaagaagacagctaaaaccaacacaaacgagtttttaatcgacgtggataaaggcgaaaactactgtttcagcgtgcaagctgtgatcccctcccggaccgtgaataggaaaagcaccgatagccccgttgagtgcatgggccaagaaaagggcgagttccgggagaactgggtgaacgtcatcagcgatttaaagaagatcgaagatttaattcagtccatgcatatcgacgccactttatacacagaatccgacgtgcacccctcttgtaaggtgaccgccatgaaatgttttttactggagctgcaagttatctctttagagagcggagacgctagcatccacgacaccgtggagaatttaatcattttagccaataactctttatccagcaacggcaacgtgacagagtccggctgcaaggagtgcgaagagctggaggagaagaacatcaaggagtttctgcaatcctttgtgcacattgtccagatgttcatcaatacctcc

SEQ ID NO: 240-249 - skipped (10 entries)

SEQ ID NO: 250 - protein, 235 aa, Artificial Sequence
  source: /note="Description of Artificial Sequence: Synthetic 7t15-7s sequence"
MKWVTFISLLFLFSSAYSDCDIEGKDGKQYESVLMVSIDQLLDSMKEIGSNCLNNEFNFFKRHICDANKEGMFLFRAARKLRQFLKMNSTGDFDLHLLKVSEGTTILLNCTGQVKGRKPAALGEAQPTKSLEENKSLKEQKKLNDLCFLKRLLQEIKTCWNKILMGTKEHITCPPPMSVEHADIWVKSYSLYSRERYICNSGFKRKAGTSSLTECVLNKATNVAHWTTPSLKCIR

SEQ ID NO: 251 - DNA, 705 bp, Artificial Sequence
  source: /note="Description of Artificial Sequence: Synthetic 7t15-7s sequence"
atgaagtgggtgaccttcatcagcctgctgttcctgttctccagcgcctactccgattgcgacatcgagggcaaggacggcaagcagtacgagagcgtgctgatggtgtccatcgaccagctgctggacagcatgaaggagatcggctccaactgcctcaacaacgagttcaacttcttcaagcggcacatctgcgacgccaacaaggagggcatgttcctgttcagggccgccaggaaactgcggcagttcctgaagatgaactccaccggcgacttcgacctgcacctgctgaaggtgtccgagggcaccaccatcctgctgaactgcaccggacaggtgaagggccggaaacctgctgctctgggagaggcccaacccaccaagagcctggaggagaacaagtccctgaaggagcagaagaagctgaacgacctgtgcttcctgaagaggctgctgcaggagatcaagacctgctggaacaagatcctgatgggcaccaaggagcatattacatgcccccctcccatgagcgtggagcacgccgacatctgggtgaagagctatagcctctacagccgggagaggtatatctgtaacagcggcttcaagaggaaggccggcaccagcagcctcaccgagtgcgtgctgaataaggctaccaacgtggctcactggacaacaccctctttaaagtgcatccgg

SEQ ID NO: 252-256 - skipped (5 entries)

SEQ ID NO: 257 - DNA, 1056 bp, Artificial Sequence
  source: /note="Description of Artificial Sequence: Synthetic TGFRt15-TGFRs sequence"
atccccccccatgtgcaaaagagcgtgaacaacgatatgatcgtgaccgacaacaacggcgccgtgaagtttccccagctctgcaagttctgcgatgtcaggttcagcacctgcgataatcagaagtcctgcatgtccaactgcagcatcacctccatctgcgagaagccccaagaagtgtgcgtggccgtgtggcggaaaaatgacgagaacatcaccctggagaccgtgtgtcacgaccccaagctcccttatcacgacttcattctggaggacgctgcctcccccaaatgcatcatgaaggagaagaagaagcccggagagaccttctttatgtgttcctgtagcagcgacgagtgtaacgacaacatcatcttcagcgaagagtacaacaccagcaaccctgatggaggtggcggatccggaggtggaggttctggtggaggtgggagtattcctccccacgtgcagaagagcgtgaataatgacatgatcgtgaccgataacaatggcgccgtgaaatttccccagctgtgcaaattctgcgatgtgaggttttccacctgcgacaaccagaagtcctgtatgagcaactgctccatcacctccatctgtgagaagcctcaggaggtgtgcgtggctgtctggcggaagaatgacgagaatatcaccctggaaaccgtctgccacgatcccaagctgccctaccacgatttcatcctggaagacgccgccagccctaagtgcatcatgaaagagaaaaagaagcctggcgagacctttttcatgtgctcctgcagcagcgacgaatgcaacgacaatatcatctttagcgaggaatacaataccagcaaccccgacattacatgcccccctcccatgagcgtggagcacgccgacatctgggtgaagagctatagcctctacagccgggagaggtatatctgtaacagcggcttcaagaggaaggccggcaccagcagcctcaccgagtgcgtgctgaataaggctaccaacgtggctcactggacaacaccctctttaaagtgcatccgg

SEQ ID NO: 258 - skipped

SEQ ID NO: 259 - DNA, 1110 bp, Artificial Sequence
  source: /note="Description of Artificial Sequence: Synthetic TGFRt15-TGFRs sequence"
atgaagtgggtgaccttcatcagcctgctgttcctgttctccagcgcctactccatccccccccatgtgcaaaagagcgtgaacaacgatatgatcgtgaccgacaacaacggcgccgtgaagtttccccagctctgcaagttctgcgatgtcaggttcagcacctgcgataatcagaagtcctgcatgtccaactgcagcatcacctccatctgcgagaagccccaagaagtgtgcgtggccgtgtggcggaaaaatgacgagaacatcaccctggagaccgtgtgtcacgaccccaagctcccttatcacgacttcattctggaggacgctgcctcccccaaatgcatcatgaaggagaagaagaagcccggagagaccttctttatgtgttcctgtagcagcgacgagtgtaacgacaacatcatcttcagcgaagagtacaacaccagcaaccctgatggaggtggcggatccggaggtggaggttctggtggaggtgggagtattcctccccacgtgcagaagagcgtgaataatgacatgatcgtgaccgataacaatggcgccgtgaaatttccccagctgtgcaaattctgcgatgtgaggttttccacctgcgacaaccagaagtcctgtatgagcaactgctccatcacctccatctgtgagaagcctcaggaggtgtgcgtggctgtctggcggaagaatgacgagaatatcaccctggaaaccgtctgccacgatcccaagctgccctaccacgatttcatcctggaagacgccgccagccctaagtgcatcatgaaagagaaaaagaagcctggcgagacctttttcatgtgctcctgcagcagcgacgaatgcaacgacaatatcatctttagcgaggaatacaataccagcaaccccgacattacatgcccccctcccatgagcgtggagcacgccgacatctgggtgaagagctatagcctctacagccgggagaggtatatctgtaacagcggcttcaagaggaaggccggcaccagcagcctcaccgagtgcgtgctgaataaggctaccaacgtggctcactggacaacaccctctttaaagtgcatccgg

SEQ ID NO: 260 - protein, 184 aa, Homo sapiens
  source: /note="CD137"
REGPELSPDDPAGLLDLRQGMFAQLVAQNVLLIDGPLSWYSDPGLAGVSLTGGLSYKEDTKELVVAKAGVYYVFFQLELRRVVAGEGSGSVSLALHLQPLRSAAGAAALALTVDLPPASSEARNSAFGFQGRLLHLSAGQRLGVHLHTEARARHAWQLTQGATVLGLFRVTPEIPAGLPSPRSE

SEQ ID NO: 261 - DNA, 552 bp, Homo sapiens
  source: /note="CD137"
cgcgagggtcccgagctttcgcccgacgatcccgccggcctcttggacctgcggcagggcatgtttgcgcagctggtggcccaaaatgttctgctgatcgatgggcccctgagctggtacagtgacccaggcctggcaggcgtgtccctgacggggggcctgagctacaaagaggacacgaaggagctggtggtggccaaggctggagtctactatgtcttctttcaactagagctgcggcgcgtggtggccggcgagggctcaggctccgtttcacttgcgctgcacctgcagccactgcgctctgctgctggggccgccgccctggctttgaccgtggacctgccacccgcctcctccgaggctcggaactcggccttcggtttccagggccgcttgctgcacctgagtgccggccagcgcctgggcgtccatcttcacactgaggccagggcacgccatgcctggcagcttacccagggcgccacagtcttgggactcttccgggtgacccccgaaatcccagccggactcccttcaccgaggtcggaa

SEQ ID NO: 262 - protein, 165 aa, Homo sapiens
  source: /note="CD137"
DPAGLLDLRQGMFAQLVAQNVLLIDGPLSWYSDPGLAGVSLTGGLSYKEDTKELVVAKAGVYYVFFQLELRRVVAGEGSGSVSLALHLQPLRSAAGAAALALTVDLPPASSEARNSAFGFQGRLLHLSAGQRLGVHLHTEARARHAWQLTQGATVLGLFRVTPEI

SEQ ID NO: 263 - DNA, 495 bp, Homo sapiens
  source: /note="CD137"
gatcccgccggcctcttggacctgcggcagggcatgtttgcgcagctggtggcccaaaatgttctgctgatcgatgggcccctgagctggtacagtgacccaggcctggcaggcgtgtccctgacggggggcctgagctacaaagaggacacgaaggagctggtggtggccaaggctggagtctactatgtcttctttcaactagagctgcggcgcgtggtggccggcgagggctcaggctccgtttcacttgcgctgcacctgcagccactgcgctctgctgctggggccgccgccctggctttgaccgtggacctgccacccgcctcctccgaggctcggaactcggccttcggtttccagggccgcttgctgcacctgagtgccggccagcgcctgggcgtccatcttcacactgaggccagggcacgccatgcctggcagcttacccagggcgccacagtcttgggactcttccgggtgacccccgaaatc

SEQ ID NO: 264-267 - skipped (4 entries)

SEQ ID NO: 268 - protein, 397 aa, Artificial Sequence
  source: /note="Description of Artificial Sequence: Synthetic 7t15-21CD137 sequence"
QGQDRHMIRMRQLIDIVDQLKNYVNDLVPEFLPAPEDVETNCEWSAFSCFQKAQLKSANTGNNERIINVSIKKLKRKPPSTNAGRRQKHRLTCPSCDSYEKKPPKEFLERFKSLLQKMIHQHLSSRTHGSEDSITCPPPMSVEHADIWVKSYSLYSRERYICNSGFKRKAGTSSLTECVLNKATNVAHWTTPSLKCIRGGGGSGGGGSGGGGSREGPELSPDDPAGLLDLRQGMFAQLVAQNVLLIDGPLSWYSDPGLAGVSLTGGLSYKEDTKELVVAKAGVYYVFFQLELRRVVAGEGSGSVSLALHLQPLRSAAGAAALALTVDLPPASSEARNSAFGFQGRLLHLSAGQRLGVHLHTEARARHAWQLTQGATVLGLFRVTPEIPAGLPSPRSE

SEQ ID NO: 269 - DNA, 1191 bp, Artificial Sequence
  source: /note="Description of Artificial Sequence: Synthetic 7t15-21CD137 sequence"
cagggccaggacaggcacatgatccggatgaggcagctcatcgacatcgtcgaccagctgaagaactacgtgaacgacctggtgcccgagtttctgcctgcccccgaggacgtggagaccaactgcgagtggtccgccttctcctgctttcagaaggcccagctgaagtccgccaacaccggcaacaacgagcggatcatcaacgtgagcatcaagaagctgaagcggaagcctccctccacaaacgccggcaggaggcagaagcacaggctgacctgccccagctgtgactcctacgagaagaagccccccaaggagttcctggagaggttcaagtccctgctgcagaagatgatccatcagcacctgtcctccaggacccacggctccgaggactccattacatgcccccctcccatgagcgtggagcacgccgacatctgggtgaagagctatagcctctacagccgggagaggtatatctgtaacagcggcttcaagaggaaggccggcaccagcagcctcaccgagtgcgtgctgaataaggctaccaacgtggctcactggacaacaccctctttaaagtgcatccggggcggtggaggatccggaggaggtggctccggcggcggaggatctcgcgagggtcccgagctttcgcccgacgatcccgccggcctcttggacctgcggcagggcatgtttgcgcagctggtggcccaaaatgttctgctgatcgatgggcccctgagctggtacagtgacccaggcctggcaggcgtgtccctgacggggggcctgagctacaaagaggacacgaaggagctggtggtggccaaggctggagtctactatgtcttctttcaactagagctgcggcgcgtggtggccggcgagggctcaggctccgtttcacttgcgctgcacctgcagccactgcgctctgctgctggggccgccgccctggctttgaccgtggacctgccacccgcctcctccgaggctcggaactcggccttcggtttccagggccgcttgctgcacctgagtgccggccagcgcctgggcgtccatcttcacactgaggccagggcacgccatgcctggcagcttacccagggcgccacagtcttgggactcttccgggtgacccccgaaatcccagccggactcccttcaccgaggtcggaa

SEQ ID NO: 270 - protein, 415 aa, Artificial Sequence
  source: /note="Description of Artificial Sequence: Synthetic 7t15-21CD137 sequence"
MKWVTFISLLFLFSSAYSQGQDRHMIRMRQLIDIVDQLKNYVNDLVPEFLPAPEDVETNCEWSAFSCFQKAQLKSANTGNNERIINVSIKKLKRKPPSTNAGRRQKHRLTCPSCDSYEKKPPKEFLERFKSLLQKMIHQHLSSRTHGSEDSITCPPPMSVEHADIWVKSYSLYSRERYICNSGFKRKAGTSSLTECVLNKATNVAHWTTPSLKCIRGGGGSGGGGSGGGGSREGPELSPDDPAGLLDLRQGMFAQLVAQNVLLIDGPLSWYSDPGLAGVSLTGGLSYKEDTKELVVAKAGVYYVFFQLELRRVVAGEGSGSVSLALHLQPLRSAAGAAALALTVDLPPASSEARNSAFGFQGRLLHLSAGQRLGVHLHTEARARHAWQLTQGATVLGLFRVTPEIPAGLPSPRSE

SEQ ID NO: 271 - DNA, 1245 bp, Artificial Sequence
  source: /note="Description of Artificial Sequence: Synthetic 7t15-21CD137 sequence"
atgaagtgggtgaccttcatcagcctgctgttcctgttctccagcgcctactcccagggccaggacaggcacatgatccggatgaggcagctcatcgacatcgtcgaccagctgaagaactacgtgaacgacctggtgcccgagtttctgcctgcccccgaggacgtggagaccaactgcgagtggtccgccttctcctgctttcagaaggcccagctgaagtccgccaacaccggcaacaacgagcggatcatcaacgtgagcatcaagaagctgaagcggaagcctccctccacaaacgccggcaggaggcagaagcacaggctgacctgccccagctgtgactcctacgagaagaagccccccaaggagttcctggagaggttcaagtccctgctgcagaagatgatccatcagcacctgtcctccaggacccacggctccgaggactccattacatgcccccctcccatgagcgtggagcacgccgacatctgggtgaagagctatagcctctacagccgggagaggtatatctgtaacagcggcttcaagaggaaggccggcaccagcagcctcaccgagtgcgtgctgaataaggctaccaacgtggctcactggacaacaccctctttaaagtgcatccggggcggtggaggatccggaggaggtggctccggcggcggaggatctcgcgagggtcccgagctttcgcccgacgatcccgccggcctcttggacctgcggcagggcatgtttgcgcagctggtggcccaaaatgttctgctgatcgatgggcccctgagctggtacagtgacccaggcctggcaggcgtgtccctgacggggggcctgagctacaaagaggacacgaaggagctggtggtggccaaggctggagtctactatgtcttctttcaactagagctgcggcgcgtggtggccggcgagggctcaggctccgtttcacttgcgctgcacctgcagccactgcgctctgctgctggggccgccgccctggctttgaccgtggacctgccacccgcctcctccgaggctcggaactcggccttcggtttccagggccgcttgctgcacctgagtgccggccagcgcctgggcgtccatcttcacactgaggccagggcacgccatgcctggcagcttacccagggcgccacagtcttgggactcttccgggtgacccccgaaatcccagccggactcccttcaccgaggtcggaa

SEQ ID NO: 272 - protein, 378 aa, Artificial Sequence
  source: /note="Description of Artificial Sequence: Synthetic 7t15-21CD137 sequence"
QGQDRHMIRMRQLIDIVDQLKNYVNDLVPEFLPAPEDVETNCEWSAFSCFQKAQLKSANTGNNERIINVSIKKLKRKPPSTNAGRRQKHRLTCPSCDSYEKKPPKEFLERFKSLLQKMIHQHLSSRTHGSEDSITCPPPMSVEHADIWVKSYSLYSRERYICNSGFKRKAGTSSLTECVLNKATNVAHWTTPSLKCIRGGGGSGGGGSGGGGSDPAGLLDLRQGMFAQLVAQNVLLIDGPLSWYSDPGLAGVSLTGGLSYKEDTKELVVAKAGVYYVFFQLELRRVVAGEGSGSVSLALHLQPLRSAAGAAALALTVDLPPASSEARNSAFGFQGRLLHLSAGQRLGVHLHTEARARHAWQLTQGATVLGLFRVTPEI

SEQ ID NO: 273 - DNA, 1134 bp, Artificial Sequence
  source: /note="Description of Artificial Sequence: Synthetic 7t15-21CD137 sequence"
cagggccaggacaggcacatgatccggatgaggcagctcatcgacatcgtcgaccagctgaagaactacgtgaacgacctggtgcccgagtttctgcctgcccccgaggacgtggagaccaactgcgagtggtccgccttctcctgctttcagaaggcccagctgaagtccgccaacaccggcaacaacgagcggatcatcaacgtgagcatcaagaagctgaagcggaagcctccctccacaaacgccggcaggaggcagaagcacaggctgacctgccccagctgtgactcctacgagaagaagccccccaaggagttcctggagaggttcaagtccctgctgcagaagatgatccatcagcacctgtcctccaggacccacggctccgaggactccattacatgcccccctcccatgagcgtggagcacgccgacatctgggtgaagagctatagcctctacagccgggagaggtatatctgtaacagcggcttcaagaggaaggccggcaccagcagcctcaccgagtgcgtgctgaataaggctaccaacgtggctcactggacaacaccctctttaaagtgcatccggggcggtggaggatccggaggaggtggctccggcggcggaggatctgatcccgccggcctcttggacctgcggcagggcatgtttgcgcagctggtggcccaaaatgttctgctgatcgatgggcccctgagctggtacagtgacccaggcctggcaggcgtgtccctgacggggggcctgagctacaaagaggacacgaaggagctggtggtggccaaggctggagtctactatgtcttctttcaactagagctgcggcgcgtggtggccggcgagggctcaggctccgtttcacttgcgctgcacctgcagccactgcgctctgctgctggggccgccgccctggctttgaccgtggacctgccacccgcctcctccgaggctcggaactcggccttcggtttccagggccgcttgctgcacctgagtgccggccagcgcctgggcgtccatcttcacactgaggccagggcacgccatgcctggcagcttacccagggcgccacagtcttgggactcttccgggtgacccccgaaatc

SEQ ID NO: 274 - protein, 396 aa, Artificial Sequence
  source: /note="Description of Artificial Sequence: Synthetic 7t15-21CD137 sequence"
MKWVTFISLLFLFSSAYSQGQDRHMIRMRQLIDIVDQLKNYVNDLVPEFLPAPEDVETNCEWSAFSCFQKAQLKSANTGNNERIINVSIKKLKRKPPSTNAGRRQKHRLTCPSCDSYEKKPPKEFLERFKSLLQKMIHQHLSSRTHGSEDSITCPPPMSVEHADIWVKSYSLYSRERYICNSGFKRKAGTSSLTECVLNKATNVAHWTTPSLKCIRGGGGSGGGGSGGGGSDPAGLLDLRQGMFAQLVAQNVLLIDGPLSWYSDPGLAGVSLTGGLSYKEDTKELVVAKAGVYYVFFQLELRRVVAGEGSGSVSLALHLQPLRSAAGAAALALTVDLPPASSEARNSAFGFQGRLLHLSAGQRLGVHLHTEARARHAWQLTQGATVLGLFRVTPEI

SEQ ID NO: 275 - DNA, 1188 bp, Artificial Sequence
  source: /note="Description of Artificial Sequence: Synthetic 7t15-21CD137 sequence"
atgaagtgggtgaccttcatcagcctgctgttcctgttctccagcgcctactcccagggccaggacaggcacatgatccggatgaggcagctcatcgacatcgtcgaccagctgaagaactacgtgaacgacctggtgcccgagtttctgcctgcccccgaggacgtggagaccaactgcgagtggtccgccttctcctgctttcagaaggcccagctgaagtccgccaacaccggcaacaacgagcggatcatcaacgtgagcatcaagaagctgaagcggaagcctccctccacaaacgccggcaggaggcagaagcacaggctgacctgccccagctgtgactcctacgagaagaagccccccaaggagttcctggagaggttcaagtccctgctgcagaagatgatccatcagcacctgtcctccaggacccacggctccgaggactccattacatgcccccctcccatgagcgtggagcacgccgacatctgggtgaagagctatagcctctacagccgggagaggtatatctgtaacagcggcttcaagaggaaggccggcaccagcagcctcaccgagtgcgtgctgaataaggctaccaacgtggctcactggacaacaccctctttaaagtgcatccggggcggtggaggatccggaggaggtggctccggcggcggaggatctgatcccgccggcctcttggacctgcggcagggcatgtttgcgcagctggtggcccaaaatgttctgctgatcgatgggcccctgagctggtacagtgacccaggcctggcaggcgtgtccctgacggggggcctgagctacaaagaggacacgaaggagctggtggtggccaaggctggagtctactatgtcttctttcaactagagctgcggcgcgtggtggccggcgagggctcaggctccgtttcacttgcgctgcacctgcagccactgcgctctgctgctggggccgccgccctggctttgaccgtggacctgccacccgcctcctccgaggctcggaactcggccttcggtttccagggccgcttgctgcacctgagtgccggccagcgcctgggcgtccatcttcacactgaggccagggcacgccatgcctggcagcttacccagggcgccacagtcttgggactcttccgggtgacccccgaaatc

SEQ ID NO: 276-299 - skipped (24 entries)

SEQ ID NO: 300 - protein, 485 aa, Artificial Sequence
  source: /note="Description of Artificial Sequence: Synthetic TGFRt15-TGFRs21 sequence"
IPPHVQKSVNNDMIVTDNNGAVKFPQLCKFCDVRFSTCDNQKSCMSNCSITSICEKPQEVCVAVWRKNDENITLETVCHDPKLPYHDFILEDAASPKCIMKEKKKPGETFFMCSCSSDECNDNIIFSEEYNTSNPDGGGGSGGGGSGGGGSIPPHVQKSVNNDMIVTDNNGAVKFPQLCKFCDVRFSTCDNQKSCMSNCSITSICEKPQEVCVAVWRKNDENITLETVCHDPKLPYHDFILEDAASPKCIMKEKKKPGETFFMCSCSSDECNDNIIFSEEYNTSNPDITCPPPMSVEHADIWVKSYSLYSRERYICNSGFKRKAGTSSLTECVLNKATNVAHWTTPSLKCIRQGQDRHMIRMRQLIDIVDQLKNYVNDLVPEFLPAPEDVETNCEWSAFSCFQKAQLKSANTGNNERIINVSIKKLKRKPPSTNAGRRQKHRLTCPSCDSYEKKPPKEFLERFKSLLQKMIHQHLSSRTHGSEDS

SEQ ID NO: 301 - DNA, 1455 bp, Artificial Sequence
  source: /note="Description of Artificial Sequence: Synthetic TGFRt15-TGFRs21 sequence"
atccccccccatgtgcaaaagagcgtgaacaacgatatgatcgtgaccgacaacaacggcgccgtgaagtttccccagctctgcaagttctgcgatgtcaggttcagcacctgcgataatcagaagtcctgcatgtccaactgcagcatcacctccatctgcgagaagccccaagaagtgtgcgtggccgtgtggcggaaaaatgacgagaacatcaccctggagaccgtgtgtcacgaccccaagctcccttatcacgacttcattctggaggacgctgcctcccccaaatgcatcatgaaggagaagaagaagcccggagagaccttctttatgtgttcctgtagcagcgacgagtgtaacgacaacatcatcttcagcgaagagtacaacaccagcaaccctgatggaggtggcggatccggaggtggaggttctggtggaggtgggagtattcctccccacgtgcagaagagcgtgaataatgacatgatcgtgaccgataacaatggcgccgtgaaatttccccagctgtgcaaattctgcgatgtgaggttttccacctgcgacaaccagaagtcctgtatgagcaactgctccatcacctccatctgtgagaagcctcaggaggtgtgcgtggctgtctggcggaagaatgacgagaatatcaccctggaaaccgtctgccacgatcccaagctgccctaccacgatttcatcctggaagacgccgccagccctaagtgcatcatgaaagagaaaaagaagcctggcgagacctttttcatgtgctcctgcagcagcgacgaatgcaacgacaatatcatctttagcgaggaatacaataccagcaaccccgacattacatgcccccctcccatgagcgtggagcacgccgacatctgggtgaagagctatagcctctacagccgggagaggtatatctgtaacagcggcttcaagaggaaggccggcaccagcagcctcaccgagtgcgtgctgaataaggctaccaacgtggctcactggacaacaccctctttaaagtgcatccggcagggccaggacaggcacatgatccggatgaggcagctcatcgacatcgtcgaccagctgaagaactacgtgaacgacctggtgcccgagtttctgcctgcccccgaggacgtggagaccaactgcgagtggtccgccttctcctgctttcagaaggcccagctgaagtccgccaacaccggcaacaacgagcggatcatcaacgtgagcatcaagaagctgaagcggaagcctccctccacaaacgccggcaggaggcagaagcacaggctgacctgccccagctgtgactcctacgagaagaagccccccaaggagttcctggagaggttcaagtccctgctgcagaagatgatccatcagcacctgtcctccaggacccacggctccgaggactcc

SEQ ID NO: 302 - protein, 503 aa, Artificial Sequence
  source: /note="Description of Artificial Sequence: Synthetic TGFRt15-TGFRs21 sequence"
MKWVTFISLLFLFSSAYSIPPHVQKSVNNDMIVTDNNGAVKFPQLCKFCDVRFSTCDNQKSCMSNCSITSICEKPQEVCVAVWRKNDENITLETVCHDPKLPYHDFILEDAASPKCIMKEKKKPGETFFMCSCSSDECNDNIIFSEEYNTSNPDGGGGSGGGGSGGGGSIPPHVQKSVNNDMIVTDNNGAVKFPQLCKFCDVRFSTCDNQKSCMSNCSITSICEKPQEVCVAVWRKNDENITLETVCHDPKLPYHDFILEDAASPKCIMKEKKKPGETFFMCSCSSDECNDNIIFSEEYNTSNPDITCPPPMSVEHADIWVKSYSLYSRERYICNSGFKRKAGTSSLTECVLNKATNVAHWTTPSLKCIRQGQDRHMIRMRQLIDIVDQLKNYVNDLVPEFLPAPEDVETNCEWSAFSCFQKAQLKSANTGNNERIINVSIKKLKRKPPSTNAGRRQKHRLTCPSCDSYEKKPPKEFLERFKSLLQKMIHQHLSSRTHGSEDS

SEQ ID NO: 303 - DNA, 1509 bp, Artificial Sequence
  source: /note="Description of Artificial Sequence: Synthetic TGFRt15-TGFRs21 sequence"
atgaagtgggtgaccttcatcagcctgctgttcctgttctccagcgcctactccatccccccccatgtgcaaaagagcgtgaacaacgatatgatcgtgaccgacaacaacggcgccgtgaagtttccccagctctgcaagttctgcgatgtcaggttcagcacctgcgataatcagaagtcctgcatgtccaactgcagcatcacctccatctgcgagaagccccaagaagtgtgcgtggccgtgtggcggaaaaatgacgagaacatcaccctggagaccgtgtgtcacgaccccaagctcccttatcacgacttcattctggaggacgctgcctcccccaaatgcatcatgaaggagaagaagaagcccggagagaccttctttatgtgttcctgtagcagcgacgagtgtaacgacaacatcatcttcagcgaagagtacaacaccagcaaccctgatggaggtggcggatccggaggtggaggttctggtggaggtgggagtattcctccccacgtgcagaagagcgtgaataatgacatgatcgtgaccgataacaatggcgccgtgaaatttccccagctgtgcaaattctgcgatgtgaggttttccacctgcgacaaccagaagtcctgtatgagcaactgctccatcacctccatctgtgagaagcctcaggaggtgtgcgtggctgtctggcggaagaatgacgagaatatcaccctggaaaccgtctgccacgatcccaagctgccctaccacgatttcatcctggaagacgccgccagccctaagtgcatcatgaaagagaaaaagaagcctggcgagacctttttcatgtgctcctgcagcagcgacgaatgcaacgacaatatcatctttagcgaggaatacaataccagcaaccccgacattacatgcccccctcccatgagcgtggagcacgccgacatctgggtgaagagctatagcctctacagccgggagaggtatatctgtaacagcggcttcaagaggaaggccggcaccagcagcctcaccgagtgcgtgctgaataaggctaccaacgtggctcactggacaacaccctctttaaagtgcatccggcagggccaggacaggcacatgatccggatgaggcagctcatcgacatcgtcgaccagctgaagaactacgtgaacgacctggtgcccgagtttctgcctgcccccgaggacgtggagaccaactgcgagtggtccgccttctcctgctttcagaaggcccagctgaagtccgccaacaccggcaacaacgagcggatcatcaacgtgagcatcaagaagctgaagcggaagcctccctccacaaacgccggcaggaggcagaagcacaggctgacctgccccagctgtgactcctacgagaagaagccccccaaggagttcctggagaggttcaagtccctgctgcagaagatgatccatcagcacctgtcctccaggacccacggctccgaggactcc

SEQ ID NO: 304-307 - skipped (4 entries)

SEQ ID NO: 308 - protein, 592 aa, Artificial Sequence
  source: /note="Description of Artificial Sequence: Synthetic TGFRt15-TGFRs16 sequence"
IPPHVQKSVNNDMIVTDNNGAVKFPQLCKFCDVRFSTCDNQKSCMSNCSITSICEKPQEVCVAVWRKNDENITLETVCHDPKLPYHDFILEDAASPKCIMKEKKKPGETFFMCSCSSDECNDNIIFSEEYNTSNPDGGGGSGGGGSGGGGSIPPHVQKSVNNDMIVTDNNGAVKFPQLCKFCDVRFSTCDNQKSCMSNCSITSICEKPQEVCVAVWRKNDENITLETVCHDPKLPYHDFILEDAASPKCIMKEKKKPGETFFMCSCSSDECNDNIIFSEEYNTSNPDITCPPPMSVEHADIWVKSYSLYSRERYICNSGFKRKAGTSSLTECVLNKATNVAHWTTPSLKCIRSELTQDPAVSVALGQTVRITCQGDSLRSYYASWYQQKPGQAPVLVIYGKNNRPSGIPDRFSGSSSGNTASLTITGAQAEDEADYYCNSRDSSGNHVVFGGGTKLTVGHGGGGSGGGGSGGGGSEVQLVESGGGVVRPGGSLRLSCAASGFTFDDYGMSWVRQAPGKGLEWVSGINWNGGSTGYADSVKGRFTISRDNAKNSLYLQMNSLRAEDTAVYYCARGRSLLFDYWGQGTLVTVSR

SEQ ID NO: 309 - DNA, 1776 bp, Artificial Sequence
  source: /note="Description of Artificial Sequence: Synthetic TGFRt15-TGFRs16 sequence"
atccccccccatgtgcaaaagagcgtgaacaacgatatgatcgtgaccgacaacaacggcgccgtgaagtttccccagctctgcaagttctgcgatgtcaggttcagcacctgcgataatcagaagtcctgcatgtccaactgcagcatcacctccatctgcgagaagccccaagaagtgtgcgtggccgtgtggcggaaaaatgacgagaacatcaccctggagaccgtgtgtcacgaccccaagctcccttatcacgacttcattctggaggacgctgcctcccccaaatgcatcatgaaggagaagaagaagcccggagagaccttctttatgtgttcctgtagcagcgacgagtgtaacgacaacatcatcttcagcgaagagtacaacaccagcaaccctgatggaggtggcggatccggaggtggaggttctggtggaggtgggagtattcctccccacgtgcagaagagcgtgaataatgacatgatcgtgaccgataacaatggcgccgtgaaatttccccagctgtgcaaattctgcgatgtgaggttttccacctgcgacaaccagaagtcctgtatgagcaactgctccatcacctccatctgtgagaagcctcaggaggtgtgcgtggctgtctggcggaagaatgacgagaatatcaccctggaaaccgtctgccacgatcccaagctgccctaccacgatttcatcctggaagacgccgccagccctaagtgcatcatgaaagagaaaaagaagcctggcgagacctttttcatgtgctcctgcagcagcgacgaatgcaacgacaatatcatctttagcgaggaatacaataccagcaaccccgacattacatgcccccctcccatgagcgtggagcacgccgacatctgggtgaagagctatagcctctacagccgggagaggtatatctgtaacagcggcttcaagaggaaggccggcaccagcagcctcaccgagtgcgtgctgaataaggctaccaacgtggctcactggacaacaccctctttaaagtgcatccggtccgagctgacccaggaccctgctgtgtccgtggctctgggccagaccgtgaggatcacctgccagggcgactccctgaggtcctactacgcctcctggtaccagcagaagcccggccaggctcctgtgctggtgatctacggcaagaacaacaggccctccggcatccctgacaggttctccggatcctcctccggcaacaccgcctccctgaccatcacaggcgctcaggccgaggacgaggctgactactactgcaactccagggactcctccggcaaccatgtggtgttcggcggcggcaccaagctgaccgtgggccatggcggcggcggctccggaggcggcggcagcggcggaggaggatccgaggtgcagctggtggagtccggaggaggagtggtgaggcctggaggctccctgaggctgagctgtgctgcctccggcttcaccttcgacgactacggcatgtcctgggtgaggcaggctcctggaaagggcctggagtgggtgtccggcatcaactggaacggcggatccaccggctacgccgattccgtgaagggcaggttcaccatcagcagggacaacgccaagaactccctgtacctgcagatgaactccctgagggccgaggacaccgccgtgtactactgcgccaggggcaggtccctgctgttcgactactggggacagggcaccctggtgaccgtgtccagg

SEQ ID NO: 310 - protein, 610 aa, Artificial Sequence
  source: /note="Description of Artificial Sequence: Synthetic TGFRt15-TGFRs16 sequence"
MKWVTFISLLFLFSSAYSIPPHVQKSVNNDMIVTDNNGAVKFPQLCKFCDVRFSTCDNQKSCMSNCSITSICEKPQEVCVAVWRKNDENITLETVCHDPKLPYHDFILEDAASPKCIMKEKKKPGETFFMCSCSSDECNDNIIFSEEYNTSNPDGGGGSGGGGSGGGGSIPPHVQKSVNNDMIVTDNNGAVKFPQLCKFCDVRFSTCDNQKSCMSNCSITSICEKPQEVCVAVWRKNDENITLETVCHDPKLPYHDFILEDAASPKCIMKEKKKPGETFFMCSCSSDECNDNIIFSEEYNTSNPDITCPPPMSVEHADIWVKSYSLYSRERYICNSGFKRKAGTSSLTECVLNKATNVAHWTTPSLKCIRSELTQDPAVSVALGQTVRITCQGDSLRSYYASWYQQKPGQAPVLVIYGKNNRPSGIPDRFSGSSSGNTASLTITGAQAEDEADYYCNSRDSSGNHVVFGGGTKLTVGHGGGGSGGGGSGGGGSEVQLVESGGGVVRPGGSLRLSCAASGFTFDDYGMSWVRQAPGKGLEWVSGINWNGGSTGYADSVKGRFTISRDNAKNSLYLQMNSLRAEDTAVYYCARGRSLLFDYWGQGTLVTVSR

SEQ ID NO: 311 - DNA, 1830 bp, Artificial Sequence
  source: /note="Description of Artificial Sequence: Synthetic TGFRt15-TGFRs16 sequence"
atgaagtgggtgaccttcatcagcctgctgttcctgttctccagcgcctactccatccccccccatgtgcaaaagagcgtgaacaacgatatgatcgtgaccgacaacaacggcgccgtgaagtttccccagctctgcaagttctgcgatgtcaggttcagcacctgcgataatcagaagtcctgcatgtccaactgcagcatcacctccatctgcgagaagccccaagaagtgtgcgtggccgtgtggcggaaaaatgacgagaacatcaccctggagaccgtgtgtcacgaccccaagctcccttatcacgacttcattctggaggacgctgcctcccccaaatgcatcatgaaggagaagaagaagcccggagagaccttctttatgtgttcctgtagcagcgacgagtgtaacgacaacatcatcttcagcgaagagtacaacaccagcaaccctgatggaggtggcggatccggaggtggaggttctggtggaggtgggagtattcctccccacgtgcagaagagcgtgaataatgacatgatcgtgaccgataacaatggcgccgtgaaatttccccagctgtgcaaattctgcgatgtgaggttttccacctgcgacaaccagaagtcctgtatgagcaactgctccatcacctccatctgtgagaagcctcaggaggtgtgcgtggctgtctggcggaagaatgacgagaatatcaccctggaaaccgtctgccacgatcccaagctgccctaccacgatttcatcctggaagacgccgccagccctaagtgcatcatgaaagagaaaaagaagcctggcgagacctttttcatgtgctcctgcagcagcgacgaatgcaacgacaatatcatctttagcgaggaatacaataccagcaaccccgacattacatgcccccctcccatgagcgtggagcacgccgacatctgggtgaagagctatagcctctacagccgggagaggtatatctgtaacagcggcttcaagaggaaggccggcaccagcagcctcaccgagtgcgtgctgaataaggctaccaacgtggctcactggacaacaccctctttaaagtgcatccggtccgagctgacccaggaccctgctgtgtccgtggctctgggccagaccgtgaggatcacctgccagggcgactccctgaggtcctactacgcctcctggtaccagcagaagcccggccaggctcctgtgctggtgatctacggcaagaacaacaggccctccggcatccctgacaggttctccggatcctcctccggcaacaccgcctccctgaccatcacaggcgctcaggccgaggacgaggctgactactactgcaactccagggactcctccggcaaccatgtggtgttcggcggcggcaccaagctgaccgtgggccatggcggcggcggctccggaggcggcggcagcggcggaggaggatccgaggtgcagctggtggagtccggaggaggagtggtgaggcctggaggctccctgaggctgagctgtgctgcctccggcttcaccttcgacgactacggcatgtcctgggtgaggcaggctcctggaaagggcctggagtgggtgtccggcatcaactggaacggcggatccaccggctacgccgattccgtgaagggcaggttcaccatcagcagggacaacgccaagaactccctgtacctgcagatgaactccctgagggccgaggacaccgccgtgtactactgcgccaggggcaggtccctgctgttcgactactggggacagggcaccctggtgaccgtgtccagg

SEQ ID NO: 312-315 - skipped (4 entries)

SEQ ID NO: 316 - protein, 551 aa, Artificial Sequence
  source: /note="Description of Artificial Sequence: Synthetic TGFRt15-TGFRs137 sequence"
IPPHVQKSVNNDMIVTDNNGAVKFPQLCKFCDVRFSTCDNQKSCMSNCSITSICEKPQEVCVAVWRKNDENITLETVCHDPKLPYHDFILEDAASPKCIMKEKKKPGETFFMCSCSSDECNDNIIFSEEYNTSNPDGGGGSGGGGSGGGGSIPPHVQKSVNNDMIVTDNNGAVKFPQLCKFCDVRFSTCDNQKSCMSNCSITSICEKPQEVCVAVWRKNDENITLETVCHDPKLPYHDFILEDAASPKCIMKEKKKPGETFFMCSCSSDECNDNIIFSEEYNTSNPDITCPPPMSVEHADIWVKSYSLYSRERYICNSGFKRKAGTSSLTECVLNKATNVAHWTTPSLKCIRGGGGSGGGGSGGGGSREGPELSPDDPAGLLDLRQGMFAQLVAQNVLLIDGPLSWYSDPGLAGVSLTGGLSYKEDTKELVVAKAGVYYVFFQLELRRVVAGEGSGSVSLALHLQPLRSAAGAAALALTVDLPPASSEARNSAFGFQGRLLHLSAGQRLGVHLHTEARARHAWQLTQGATVLGLFRVTPEIPAGLPSPRSE

SEQ ID NO: 317 - DNA, 1653 bp, Artificial Sequence
  source: /note="Description of Artificial Sequence: Synthetic TGFRt15-TGFRs137 sequence"
atccccccccatgtgcaaaagagcgtgaacaacgatatgatcgtgaccgacaacaacggcgccgtgaagtttccccagctctgcaagttctgcgatgtcaggttcagcacctgcgataatcagaagtcctgcatgtccaactgcagcatcacctccatctgcgagaagccccaagaagtgtgcgtggccgtgtggcggaaaaatgacgagaacatcaccctggagaccgtgtgtcacgaccccaagctcccttatcacgacttcattctggaggacgctgcctcccccaaatgcatcatgaaggagaagaagaagcccggagagaccttctttatgtgttcctgtagcagcgacgagtgtaacgacaacatcatcttcagcgaagagtacaacaccagcaaccctgatggaggtggcggatccggaggtggaggttctggtggaggtgggagtattcctccccacgtgcagaagagcgtgaataatgacatgatcgtgaccgataacaatggcgccgtgaaatttccccagctgtgcaaattctgcgatgtgaggttttccacctgcgacaaccagaagtcctgtatgagcaactgctccatcacctccatctgtgagaagcctcaggaggtgtgcgtggctgtctggcggaagaatgacgagaatatcaccctggaaaccgtctgccacgatcccaagctgccctaccacgatttcatcctggaagacgccgccagccctaagtgcatcatgaaagagaaaaagaagcctggcgagacctttttcatgtgctcctgcagcagcgacgaatgcaacgacaatatcatctttagcgaggaatacaataccagcaaccccgacattacatgcccccctcccatgagcgtggagcacgccgacatctgggtgaagagctatagcctctacagccgggagaggtatatctgtaacagcggcttcaagaggaaggccggcaccagcagcctcaccgagtgcgtgctgaataaggctaccaacgtggctcactggacaacaccctctttaaagtgcatccggggcggtggaggatccggaggaggtggctccggcggcggaggatctcgcgagggtcccgagctttcgcccgacgatcccgccggcctcttggacctgcggcagggcatgtttgcgcagctggtggcccaaaatgttctgctgatcgatgggcccctgagctggtacagtgacccaggcctggcaggcgtgtccctgacggggggcctgagctacaaagaggacacgaaggagctggtggtggccaaggctggagtctactatgtcttctttcaactagagctgcggcgcgtggtggccggcgagggctcaggctccgtttcacttgcgctgcacctgcagccactgcgctctgctgctggggccgccgccctggctttgaccgtggacctgccacccgcctcctccgaggctcggaactcggccttcggtttccagggccgcttgctgcacctgagtgccggccagcgcctgggcgtccatcttcacactgaggccagggcacgccatgcctggcagcttacccagggcgccacagtcttgggactcttccgggtgacccccgaaatcccagccggactcccttcaccgaggtcggaa

SEQ ID NO: 318 - protein, 569 aa, Artificial Sequence
  source: /note="Description of Artificial Sequence: Synthetic TGFRt15-TGFRs137 sequence"
MKWVTFISLLFLFSSAYSIPPHVQKSVNNDMIVTDNNGAVKFPQLCKFCDVRFSTCDNQKSCMSNCSITSICEKPQEVCVAVWRKNDENITLETVCHDPKLPYHDFILEDAASPKCIMKEKKKPGETFFMCSCSSDECNDNIIFSEEYNTSNPDGGGGSGGGGSGGGGSIPPHVQKSVNNDMIVTDNNGAVKFPQLCKFCDVRFSTCDNQKSCMSNCSITSICEKPQEVCVAVWRKNDENITLETVCHDPKLPYHDFILEDAASPKCIMKEKKKPGETFFMCSCSSDECNDNIIFSEEYNTSNPDITCPPPMSVEHADIWVKSYSLYSRERYICNSGFKRKAGTSSLTECVLNKATNVAHWTTPSLKCIRGGGGSGGGGSGGGGSREGPELSPDDPAGLLDLRQGMFAQLVAQNVLLIDGPLSWYSDPGLAGVSLTGGLSYKEDTKELVVAKAGVYYVFFQLELRRVVAGEGSGSVSLALHLQPLRSAAGAAALALTVDLPPASSEARNSAFGFQGRLLHLSAGQRLGVHLHTEARARHAWQLTQGATVLGLFRVTPEIPAGLPSPRSE

SEQ ID NO: 319 - DNA, 1707 bp, Artificial Sequence
  source: /note="Description of Artificial Sequence: Synthetic TGFRt15-TGFRs137 sequence"
atgaagtgggtgaccttcatcagcctgctgttcctgttctccagcgcctactccatccccccccatgtgcaaaagagcgtgaacaacgatatgatcgtgaccgacaacaacggcgccgtgaagtttccccagctctgcaagttctgcgatgtcaggttcagcacctgcgataatcagaagtcctgcatgtccaactgcagcatcacctccatctgcgagaagccccaagaagtgtgcgtggccgtgtggcggaaaaatgacgagaacatcaccctggagaccgtgtgtcacgaccccaagctcccttatcacgacttcattctggaggacgctgcctcccccaaatgcatcatgaaggagaagaagaagcccggagagaccttctttatgtgttcctgtagcagcgacgagtgtaacgacaacatcatcttcagcgaagagtacaacaccagcaaccctgatggaggtggcggatccggaggtggaggttctggtggaggtgggagtattcctccccacgtgcagaagagcgtgaataatgacatgatcgtgaccgataacaatggcgccgtgaaatttccccagctgtgcaaattctgcgatgtgaggttttccacctgcgacaaccagaagtcctgtatgagcaactgctccatcacctccatctgtgagaagcctcaggaggtgtgcgtggctgtctggcggaagaatgacgagaatatcaccctggaaaccgtctgccacgatcccaagctgccctaccacgatttcatcctggaagacgccgccagccctaagtgcatcatgaaagagaaaaagaagcctggcgagacctttttcatgtgctcctgcagcagcgacgaatgcaacgacaatatcatctttagcgaggaatacaataccagcaaccccgacattacatgcccccctcccatgagcgtggagcacgccgacatctgggtgaagagctatagcctctacagccgggagaggtatatctgtaacagcggcttcaagaggaaggccggcaccagcagcctcaccgagtgcgtgctgaataaggctaccaacgtggctcactggacaacaccctctttaaagtgcatccggggcggtggaggatccggaggaggtggctccggcggcggaggatctcgcgagggtcccgagctttcgcccgacgatcccgccggcctcttggacctgcggcagggcatgtttgcgcagctggtggcccaaaatgttctgctgatcgatgggcccctgagctggtacagtgacccaggcctggcaggcgtgtccctgacggggggcctgagctacaaagaggacacgaaggagctggtggtggccaaggctggagtctactatgtcttctttcaactagagctgcggcgcgtggtggccggcgagggctcaggctccgtttcacttgcgctgcacctgcagccactgcgctctgctgctggggccgccgccctggctttgaccgtggacctgccacccgcctcctccgaggctcggaactcggccttcggtttccagggccgcttgctgcacctgagtgccggccagcgcctgggcgtccatcttcacactgaggccagggcacgccatgcctggcagcttacccagggcgccacagtcttgggactcttccgggtgacccccgaaatcccagccggactcccttcaccgaggtcggaa

SEQ ID NO: 320 - DNA, 720 bp, Artificial Sequence
  source: /note="Description of Artificial Sequence: Synthetic 18s sequence"
atgaagtgggtcacatttatctctttactgttcctcttctccagcgcctacagctacttcggcaaactggaatccaagctgagcgtgatccggaatttaaacgaccaagttctgtttatcgatcaaggtaaccggcctctgttcgaggacatgaccgactccgattgccgggacaatgccccccggaccatcttcattatctccatgtacaaggacagccagccccggggcatggctgtgacaattagcgtgaagtgtgagaaaatcagcactttatcttgtgagaacaagatcatctcctttaaggaaatgaacccccccgataacatcaaggacaccaagtccgatatcatcttcttccagcggtccgtgcccggtcacgataacaagatgcagttcgaatcctcctcctacgagggctactttttagcttgtgaaaaggagagggatttattcaagctgatcctcaagaaggaggacgagctgggcgatcgttccatcatgttcaccgtccaaaacgaggatattacatgcccccctcccatgagcgtggagcacgccgacatctgggtgaagagctatagcctctacagccgggagaggtatatctgtaacagcggcttcaagaggaaggccggcaccagcagcctcaccgagtgcgtgctgaataaggctaccaacgtggctcactggacaacaccctctttaaagtgcatccgg

SEQ ID NO: 321 - DNA, 2607 bp, Artificial Sequence
  source: /note="Description of Artificial Sequence: Synthetic 12t15 sequence"
atgaaatgggtgacctttatttctttactgttcctctttagcagcgcctactccatttgggaactgaagaaggacgtctacgtggtcgaactggactggtatcccgatgctcccggcgaaatggtggtgctcacttgtgacacccccgaagaagacggcatcacttggaccctcgatcagagcagcgaggtgctgggctccggaaagaccctcacaatccaagttaaggagttcggagacgctggccaatacacatgccacaagggaggcgaggtgctcagccattccttattattattacacaagaaggaagacggaatctggtccaccgacattttaaaagatcagaaggagcccaagaataagacctttttaaggtgtgaggccaaaaactacagcggtcgtttcacttgttggtggctgaccaccatttccaccgatttaaccttctccgtgaaaagcagccggggaagctccgaccctcaaggtgtgacatgtggagccgctaccctcagcgctgagagggttcgtggcgataacaaggaatacgagtacagcgtggagtgccaagaagatagcgcttgtcccgctgccgaagaatctttacccattgaggtgatggtggacgccgtgcacaaactcaagtacgagaactacacctcctccttctttatccgggacatcattaagcccgatcctcctaagaatttacagctgaagcctctcaaaaatagccggcaagttgaggtctcttgggaatatcccgacacttggagcacaccccacagctacttctctttaaccttttgtgtgcaagttcaaggtaaaagcaagcgggagaagaaagaccgggtgtttaccgacaaaaccagcgccaccgtcatctgtcggaagaacgcctccatcagcgtgagggctcaagatcgttattactccagcagctggtccgagtgggccagcgtgccttgttccggcggtggaggatccggaggaggtggctccggcggcggaggatctcgtaacctccccgtggctacccccgatcccggaatgttcccttgtttacaccacagccagaatttactgagggccgtgagcaacatgctgcagaaagctaggcagactttagaattttacccttgcaccagcgaggagatcgaccatgaagatatcaccaaggacaagacatccaccgtggaggcttgtttacctctggagctgacaaagaacgagtcttgtctcaactctcgtgaaaccagcttcatcacaaatggctcttgtttagcttcccggaagacctcctttatgatggctttatgcctcagctccatctacgaggatttaaagatgtaccaagtggagttcaagaccatgaacgccaagctgctcatggaccctaaacggcagatctttttagaccagaacatgctggctgtgattgatgagctgatgcaagctttaaacttcaactccgagaccgtccctcagaagtcctccctcgaggagcccgatttttacaagacaaagatcaaactgtgcattttactccacgcctttaggatccgggccgtgaccattgaccgggtcatgagctatttaaacgccagcagcggcacaaccaacacagtcgctgcctataacctcacttggaagagcaccaacttcaaaaccatcctcgaatgggaacccaaacccgttaaccaagtttacaccgtgcagatcagcaccaagtccggcgactggaagtccaaatgtttctataccaccgacaccgagtgcgatctcaccgatgagatcgtgaaagatgtgaaacagacctacctcgcccgggtgtttagctaccccgccggcaatgtggagagcactggttccgctggcgagcctttatacgagaacagccccgaatttaccccttacctcgagaccaatttaggacagcccaccatccaaagctttgagcaagttggcacaaaggtgaatgtgacagtggaggacgagcggactttagtgcggcggaacaacacctttctcagcctccgggatgtgttcggcaaagatttaatctacacactgtattactggaagtcctcttcctccggcaagaagacagctaaaaccaacacaaacgagtttttaatcgacgtggataaaggcgaaaactactgtttcagcgtgcaagctgtgatcccctcccggaccgtgaataggaaaagcaccgatagccccgttgagtgcatgggccaagaaaagggcgagttccgggagaactgggtgaacgtcatcagcgatttaaagaagatcgaagatttaattcagtccatgcatatcgacgccactttatacacagaatccgacgtgcacccctcttgtaaggtgaccgccatgaaatgttttttactggagctgcaagttatctctttagagagcggagacgctagcatccacgacaccgtggagaatttaatcattttagccaataactctttatccagcaacggcaacgtgacagagtccggctgcaaggagtgcgaagagctggaggagaagaacatcaaggagtttctgcaatcctttgtgcacattgtccagatgttcatcaatacctcc

SEQ ID NO: 322 - protein, 240 aa, Artificial Sequence
  source: /note="Description of Artificial Sequence: Synthetic 18s sequence"
MKWVTFISLLFLFSSAYSYFGKLESKLSVIRNLNDQVLFIDQGNRPLFEDMTDSDCRDNAPRTIFIISMYKDSQPRGMAVTISVKCEKISTLSCENKIISFKEMNPPDNIKDTKSDIIFFQRSVPGHDNKMQFESSSYEGYFLACEKERDLFKLILKKEDELGDRSIMFTVQNEDITCPPPMSVEHADIWVKSYSLYSRERYICNSGFKRKAGTSSLTECVLNKATNVAHWTTPSLKCIR

SEQ ID NO: 323 - protein, 869 aa, Artificial Sequence
  source: /note="Description of Artificial Sequence: Synthetic 12t15 sequence"
MKWVTFISLLFLFSSAYSIWELKKDVYVVELDWYPDAPGEMVVLTCDTPEEDGITWTLDQSSEVLGSGKTLTIQVKEFGDAGQYTCHKGGEVLSHSLLLLHKKEDGIWSTDILKDQKEPKNKTFLRCEAKNYSGRFTCWWLTTISTDLTFSVKSSRGSSDPQGVTCGAATLSAERVRGDNKEYEYSVECQEDSACPAAEESLPIEVMVDAVHKLKYENYTSSFFIRDIIKPDPPKNLQLKPLKNSRQVEVSWEYPDTWSTPHSYFSLTFCVQVQGKSKREKKDRVFTDKTSATVICRKNASISVRAQDRYYSSSWSEWASVPCSGGGGSGGGGSGGGGSRNLPVATPDPGMFPCLHHSQNLLRAVSNMLQKARQTLEFYPCTSEEIDHEDITKDKTSTVEACLPLELTKNESCLNSRETSFITNGSCLASRKTSFMMALCLSSIYEDLKMYQVEFKTMNAKLLMDPKRQIFLDQNMLAVIDELMQALNFNSETVPQKSSLEEPDFYKTKIKLCILLHAFRIRAVTIDRVMSYLNASSGTTNTVAAYNLTWKSTNFKTILEWEPKPVNQVYTVQISTKSGDWKSKCFYTTDTECDLTDEIVKDVKQTYLARVFSYPAGNVESTGSAGEPLYENSPEFTPYLETNLGQPTIQSFEQVGTKVNVTVEDERTLVRRNNTFLSLRDVFGKDLIYTLYYWKSSSSGKKTAKTNTNEFLIDVDKGENYCFSVQAVIPSRTVNRKSTDSPVECMGQEKGEFRENWVNVISDLKKIEDLIQSMHIDATLYTESDVHPSCKVTAMKCFLLELQVISLESGDASIHDTVENLIILANNSLSSNGNVTESGCKECEELEEKNIKEFLQSFVHIVQMFINTS

SEQ ID NO: 324 - DNA, 1452 bp, Artificial Sequence
  source: /note="Description of Artificial Sequence: Synthetic 21t15 sequence"
atgaagtgggtgaccttcatcagcctgctgttcctgttctccagcgcctactcccagggccaggacaggcacatgatccggatgaggcagctcatcgacatcgtcgaccagctgaagaactacgtgaacgacctggtgcccgagtttctgcctgcccccgaggacgtggagaccaactgcgagtggtccgccttctcctgctttcagaaggcccagctgaagtccgccaacaccggcaacaacgagcggatcatcaacgtgagcatcaagaagctgaagcggaagcctccctccacaaacgccggcaggaggcagaagcacaggctgacctgccccagctgtgactcctacgagaagaagccccccaaggagttcctggagaggttcaagtccctgctgcagaagatgatccatcagcacctgtcctccaggacccacggctccgaggactcctccggcaccaccaataccgtggccgcttataacctcacatggaagagcaccaacttcgcgacagctctggaatgggaacccaagcccgtcaatcaagtttacaccgtgcagatctccaccaaatccggagactggaagagcaagtgcttctacacaacagacaccgagtgtgctttaaccgacgaaatcgtcaaggacgtcaagcaaacctatctggctcgggtcttttcctaccccgctggcaatgtcgagtccaccggctccgctggcgagcctctctacgagaattcccccgaattcaccccttatttagagaccaatttaggccagcctaccatccagagcttcgagcaagttggcaccaaggtgaacgtcaccgtcgaggatgaaaggactttagtggcgcggaataacacagctttatccctccgggatgtgttcggcaaagacctcatctacacactgtactattggaagtccagctcctccggcaaaaagaccgctaagaccaacaccaacgagtttttaattgacgtggacaaaggcgagaactactgcttcagcgtgcaagccgtgatcccttctcgtaccgtcaaccggaagagcacagattcccccgttgagtgcatgggccaagaaaagggcgagttccgggagaactgggtgaacgtcatcagcgatttaaagaagatcgaagatttaattcagtccatgcatatcgacgccactttatacacagaatccgacgtgcacccctcttgtaaggtgaccgccatgaaatgttttttactggagctgcaagttatctctttagagagcggagacgctagcatccacgacaccgtggagaatttaatcattttagccaataactctttatccagcaacggcaacgtgacagagtccggctgcaaggagtgcgaagagctggaggagaagaacatcaaggagtttctgcaatcctttgtgcacattgtccagatgttcatcaatacctcc

SEQ ID NO: 325 - protein, 484 aa, Artificial Sequence
  source: /note="Description of Artificial Sequence: Synthetic 21t15 sequence"
MKWVTFISLLFLFSSAYSQGQDRHMIRMRQLIDIVDQLKNYVNDLVPEFLPAPEDVETNCEWSAFSCFQKAQLKSANTGNNERIINVSIKKLKRKPPSTNAGRRQKHRLTCPSCDSYEKKPPKEFLERFKSLLQKMIHQHLSSRTHGSEDSSGTTNTVAAYNLTWKSTNFATALEWEPKPVNQVYTVQISTKSGDWKSKCFYTTDTECALTDEIVKDVKQTYLARVFSYPAGNVESTGSAGEPLYENSPEFTPYLETNLGQPTIQSFEQVGTKVNVTVEDERTLVARNNTALSLRDVFGKDLIYTLYYWKSSSSGKKTAKTNTNEFLIDVDKGENYCFSVQAVIPSRTVNRKSTDSPVECMGQEKGEFRENWVNVISDLKKIEDLIQSMHIDATLYTESDVHPSCKVTAMKCFLLELQVISLESGDASIHDTVENLIILANNSLSSNGNVTESGCKECEELEEKNIKEFLQSFVHIVQMFINTS

SEQ ID NO: 326 - DNA, 2142 bp, Artificial Sequence; identical to SEQ ID NO: 92
  source: /note="Description of Artificial Sequence: Synthetic CD28tCD3 sequence"

SEQ ID NO: 327 - protein, 714 aa, Artificial Sequence; identical to SEQ ID NO: 91
  source: /note="Description of Artificial Sequence: Synthetic CD28tCD3 sequence"

SEQ ID NO: 328 - protein, 17 aa, Artificial Sequence
  source: /note="Description of Artificial Sequence: Synthetic Signal sequence"
MGVKVLFALICIAVAEA

SEQ ID NO: 329 - protein, 454 aa, Homo sapiens
  source: /note="Myc"
MDFFRVVENQQPPATMPLNVSFTNRNYDLDYDSVQPYFYCDEEENFYQQQQQSELQPPAPSEDIWKKFELLPTPPLSPSRRSGLCSPSYVAVTPFSLRGDNDGGGGSFSTADQLEMVTELLGGDMVNQSFICDPDDETFIKNIIIQDCMWSGFSAAAKLVSEKLASYQAARKDSGSPNPARGHSVCSTSSLYLQDLSAAASECIDPSVVFPYPLNDSSSPKSCASQDSSAFSPSSDSLLSSTESSPQGSPEPLVLHEETPPTTSSDSEEEQEDEEEIDVVSVEKRQAPGKRSESGSPSAGGHSKPPHSPLVLKRCHVSTHQHNYAAPPSTRKDYPAAKRVKLDSVRVLRQISNNRKCTSPRSSDTEENVKRRTHNVLERQRRNELKRSFFALRDQIPELENNEKAPKVVILKKATAYILSVQAEEQKLISEEDLLRKRREQLKHKLEQLRNSCA

SEQ ID NO: 330 - DNA, 1365 bp, Homo sapiens
  source: /note="Myc"
ctggatttttttcgggtagtggaaaaccagcagcctcccgcgacgatgcccctcaacgttagcttcaccaacaggaactatgacctcgactacgactcggtgcagccgtatttctactgcgacgaggaggagaacttctaccagcagcagcagcagagcgagctgcagcccccggcgcccagcgaggatatctggaagaaattcgagctgctgcccaccccgcccctgtcccctagccgccgctccgggctctgctcgccctcctacgttgcggtcacacccttctcccttcggggagacaacgacggcggtggcgggagcttctccacggccgaccagctggagatggtgaccgagctgctgggaggagacatggtgaaccagagtttcatctgcgacccggacgacgagaccttcatcaaaaacatcatcatccaggactgtatgtggagcggcttctcggccgccgccaagctcgtctcagagaagctggcctcctaccaggctgcgcgcaaagacagcggcagcccgaaccccgcccgcggccacagcgtctgctccacctccagcttgtacctgcaggatctgagcgccgccgcctcagagtgcatcgacccctcggtggtcttcccctaccctctcaacgacagcagctcgcccaagtcctgcgcctcgcaagactccagcgccttctctccgtcctcggattctctgctctcctcgacggagtcctccccgcagggcagccccgagcccctggtgctccatgaggagacaccgcccaccaccagcagcgactctgaggaggaacaagaagatgaggaagaaatcgatgttgtttctgtggaaaagaggcaggctcctggcaaaaggtcagagtctggatcaccttctgctggaggccacagcaaacctcctcacagcccactggtcctcaagaggtgccacgtctccacacatcagcacaactacgcagcgcctccctccactcggaaggactatcctgctgccaagagggtcaagttggacagtgtcagagtcctgagacagatcagcaacaaccgaaaatgcaccagccccaggtcctcggacaccgaggagaatgtcaagaggcgaacacacaacgtcttggagcgccagaggaggaacgagctaaaacggagcttttttgccctgcgtgaccagatcccggagttggaaaacaatgaaaaggcccccaaggtagttatccttaaaaaagccacagcatacatcctgtccgtccaagcagaggagcaaaagctcatttctgaagaggacttgttgcggaaacgacgagaacagttgaaacacaaacttgaacagctacggaactcttgtgcgtaa

SEQ ID NO: 331 - DNA, 1245 bp, Homo sapiens; identical to SEQ ID NO: 271
  source: /note="21s137L"

SEQ ID NO: 332 - protein, 415 aa, Homo sapiens; identical to SEQ ID NO: 270
  source: /note="21s137L"

SEQ ID NO: 333 - DNA, 15 bp, Artificial Sequence
  source: /note="Description of Artificial Sequence: Synthetic primer"
ggtgggtataatggg

SEQ ID NO: 334 - DNA, 25 bp, Artificial Sequence
  source: /note="Description of Artificial Sequence: Synthetic primer"
attattttattttaaaaaatttgtg

1. A method of treating an aging-related disease or condition in a subject in need thereof, the method comprising administering to a subject identified as having an aging-related disease or condition a therapeutically effective amount of one or more natural killer (NK) cell activating agent(s).

2. A method of killing or reducing the number of senescent cells in a subject in need thereof, the method comprising administering to the subject a therapeutically effective amount of one or more NK cell activating agent(s).

3.-4. (canceled)

5. A method of treating an aging-related disease or condition in a subject in need thereof, the method comprising administering to a subject identified as having an aging-related disease or condition a therapeutically effective number of activated NK cells.

6. A method of killing or reducing the number of senescent cells in a subject in need thereof, the method comprising administering to the subject a therapeutically effective number of activated NK cells.

7. The method of claim 1, wherein the subject has been identified or diagnosed as having an aging-related disease or condition.

8. The method of claim 7, wherein the aging-related disease or condition is selected from the group consisting of: a cancer, an autoimmune disease, a metabolic disease, a neurodegenerative disease, a cardiovascular disease, a skin disease, a progeria disease, and a fragility disease.

9.-16. (canceled)

17. The method of claim 1, wherein the aging-related disease or condition is selected from the group consisting of: age-related macular degeneration, osteoarthritis, adipose atrophy, idiopathic pulmonary fibrosis, kidney transplant failure, liver fibrosis, loss of bone mass, sarcopenia, age-associated loss of lung tissue elasticity, osteoporosis, age-associated renal dysfunction, and chemical-induced renal dysfunction.

18. The method of claim 1, wherein the aging-related disease or condition is type 2 diabetes or atherosclerosis.

19. A method of improving the texture and/or appearance of skin and/or hair in a subject in need thereof over a period of time, the method comprising administering to the subject a therapeutically effective amount of one or more natural killer (NK) cell activating agent(s).

20. A method of improving the texture and/or appearance of skin and/or hair in a subject in need thereof over a period of time, the method comprising administering to the subject a therapeutically effective number of activated NK cells.

21.-30. (canceled)

31. A method of assisting in the treatment of obesity in a subject in need thereof over a period of time, the method comprising administering to the subject a therapeutically effective amount of one or more natural killer (NK) cell activating agent(s).

32. A method of assisting in the treatment of obesity in a subject in need thereof over a period of time, the method comprising administering to the subject a therapeutically effective number of activated NK cells.

33. The method of claim 1, wherein the method further comprises:
obtaining a resting NK cell; and
contacting the resting NK cell in vitro in a liquid culture medium comprising one or more NK cell activating agent(s), wherein the contacting results in the generation of the activated NK cells that are subsequently administered to the subject.

34. The method of claim 33, wherein the resting NK cell is a genetically-engineered NK cell carrying a chimeric antigen receptor or recombinant T cell receptor.

35. The method of claim 33, wherein the method further comprises introducing a nucleic acid that encodes a chimeric antigen receptor or a recombinant T cell receptor into the resting NK cell or the activated NK cell prior to administration to the subject.

36.-41. (canceled)

42. The method of claim 1, wherein at least one of the one or more NK cell activating agent(s) results in activation of one or more of: a receptor for IL-2, a receptor for IL-7, a receptor for IL-12, a receptor for IL-15, a receptor for IL-18, a receptor for IL-21, a receptor for IL-33, CD16, CD69, CD25, CD36, CD59, CD352, NKp80, DNAM-1, 2B4, NKp30, NKp44, NKp46, NKG2D, KIR2DS1, KIR2Ds2/3, KIR2DL4, KIR2DS4, KIR2DS5, and KIR3DS1.

43. The method of claim 1, wherein at least one of the one or more NK cell activating agent(s) results in a decrease in the activation of one or more of: PD-1, a TGF-β receptor, TIGIT, CD1, TIM-3, Siglec-7, IRP60, Tactile, IL1R8, NKG2A/KLRD1, KIR2DL1, KIR2DL2/3, KIR2DL5, KIR3DL1, KIR3DL2, ILT2/LIR-1, and LAG-2.

44. The method of claim 1, wherein at least one of the one or more NK cell activating agent(s) is a single-chain chimeric polypeptide comprising:
(i) a first target-binding domain;
(ii) a soluble tissue factor domain; and
(iii) a second target-binding domain.

45. The method of claim 44, wherein the first target-binding domain and the soluble tissue factor domain directly abut each other.

46. The method of claim 44, wherein the single-chain chimeric polypeptide further comprises a linker sequence between the first target-binding domain and the soluble tissue factor domain.

47. The method of claim 44, wherein the soluble tissue factor domain and the second target-binding domain directly abut each other.

48. The method of claim 44, wherein the single-chain chimeric polypeptide further comprises a linker sequence between the soluble tissue factor domain and the second target-binding domain.

49. The method of claim 1, wherein at least one of the one or more NK cell activating agent(s) is a multi-chain chimeric polypeptide comprising:
(a) a first chimeric polypeptide comprising:
(i) a first target-binding domain;
(ii) a soluble tissue factor domain; and
(iii) a first domain of a pair of affinity domains;
(b) a second chimeric polypeptide comprising:
(i) a second domain of a pair of affinity domains; and
(ii) a second target-binding domain,
wherein the first chimeric polypeptide and the second chimeric polypeptide associate through the binding of the first domain and the second domain of the pair of affinity domains.

50. The method of claim 49, wherein the first target-binding domain and the soluble tissue factor domain directly abut each other in the first chimeric polypeptide.

51. The method of claim 49, wherein the first chimeric polypeptide further comprises a linker sequence between the first target-binding domain and the soluble tissue factor domain in the first chimeric polypeptide.

52. The method of claim 49, wherein the soluble tissue factor domain and the first domain of the pair of affinity domains directly abut each other in the first chimeric polypeptide.

53. The method of claim 49, wherein the first chimeric polypeptide further comprises a linker sequence between the soluble tissue factor domain and the first domain of the pair of affinity domains in the first chimeric polypeptide.

54. The method of claim 49, wherein the second domain of the pair of affinity domains and the second target-binding domain directly abut each other in the second chimeric polypeptide.

55. The method of claim 49, wherein second chimeric polypeptide further comprises a linker sequence between the second domain of the pair of affinity domains and the second target-binding domain in the second chimeric polypeptide.

56. (canceled)

57. The method of claim 44, wherein one or both of the first target-binding domain and the second target-binding domain bind specifically to a target selected from the group consisting of: CD16a, CD33, CD20, CD19, CD22, CD123, PDL-1, TIGIT, PD-1, TIM3, CTLA4, MICA, MICB, IL-6, IL-8, TNFα, CD26, CD36, ULBP2, CD30, CD200, IGF-1R, MUC4AC, MUC5AC, Trop-2, CMET, EGFR, HER1, HER2, HER3, PSMA, CEA, B7H3, EPCAM, BCMA, P-cadherin, CEACAM5, a UL16-binding protein, HLA-DR, DLL4, TYRO3, AXL, MER, CD122, CD155, PDGF-DD, a ligand of TGF-β receptor II (TGF-βRII), a ligand of TGF-βRIII, a ligand of DNAM1, a ligand of NKp46, a ligand of NKp44, a ligand of NKG2D, a ligand of NKp30, a ligand for a scMHCI, a ligand for a scMHCII, a ligand for a scTCR, a receptor for PDGF-DD, a receptor for stem cell factor (SCF), a receptor for stem cell-like tyrosine kinase 3 ligand (FLT3L), a receptor for MICA, a receptor for MICB, a receptor for a ULP16-binding protein, a receptor for CD155, and a receptor for CD122.

58. The method of claim 44, wherein one or both of the first target-binding domain and the second target-binding domain is a soluble interleukin or cytokine protein.

59. (canceled)

60. The method of claim 44, wherein one or both of the first target-binding domain and the second target-binding domain is a soluble interleukin or cytokine receptor.

61. (canceled)

62. The method of claim 44, wherein the soluble tissue factor domain is a soluble human tissue factor domain that does not stimulate blood coagulation.

63. The method of claim 44, wherein the soluble tissue factor domain comprises or consists of a sequence from a wildtype soluble human tissue factor.
